United States Patent Application Publication US 2007/0054278 A1 - sequence listing, part 44

SEQ ID NO: 94606 - DNA, 75192 bp, Homo sapiens
  misc_feature (1)...(75192): n = A,T,C or G
ttgtggtggtgttgacagcaactggtgctcttctcctcttggccctaggctggcttcttggcaggctcctccaggggtagggatcctatccttgtgctccctacttgcccccaacccacctatggaccccagttgtgatgggtggtttcacccaagattagatgacaatgcccaagtaggtgggtgacgaactgatattgaggagggctactctccctccagaggtctttagattagggtcagagagacactgggaggaagcaacttccatcaccggcagaatccagtcttggaatgggaggagggtagataagctcagggcttgaaactgtgagtctgtcatacattgggcatttacccctattcctgacttctgccctccactggaaagctttcctgctcctgtagactctgaagttccttgtggacataggactgagcccagggaaaggggatgtaacaatgtgggcactgcatacagacattggttgttcccaatataaaggaatgggtgaatggtgctgattcctggagccagtaggcctgctgccctcactgcttcgttactcctcctggcattttaggttggcccagctgctgcaagcacccagcaaaccagcccaggctttgctgctaaacaggtcagtctcytttgcatacttctatgcctgggatcccatctcttaaactcaggttagggcccagagccttgccctgtactcttgctcgtactttgccccagcatccagggaactgagggatccatcgagggtttcctggaggcaccgaagatggagatgtcccaggcacccagcagtgtcatgagtctggtatgtcagctcaccatctcaagtagtggacaccaagggtgcttcagagtactcccctgccccctccaagccttttttcccatgccccttttccgatgaatgggtatccttgtggaaatgcccacactagcaccatcagaatggaggaggcaggtgggcttctggccccctaggggcaggccttcatctgctcccctgtgggcagggttcaattcattgcatcttttttttttttccctcagcagcattttgatggcagagcacaggactcccrtgagtccccstcttcctaagctattctctgcctgggccctcaccccatctgagtatctcctcctctctttaccccatctcaatatctcctcctactcccaggaacccaccatctatctgcttttttcctgaatggggtctgctctcatccccgctcactcttcatccatcctttgtcaaacgtctagggggtcaggagatgactcatatctggtctggtctctgcccacaacgggaggagggatgatggtgaggggagaggcctccagatagtccaatgtcaccagtgatttatgggagagtaatctggtattgccttagggaagctggtgtccagtgttggagaatcaaggaggcttcctgtgcatttgagtcagagttgagagaatttgctgagaagggagggaggggacaggttagattccagcgaaggtgggatgtcacactgagggtcctggaggaataatctcctacccttaagtaagggggagggaggcagttcttctggggccagcagcaccccctgctctcctctctctcctaccggttttaggtaccggaagagactacctgtttaacacacacacaggagcccggcgctggctctgaggccaagtagctgtcttactatgtgtggaatttctttttcacaccatcatgggctgtattttcaagttgattcataataaacaaaattacaaaaasaaaagttctagccttgtagccaacgtgtgggagaagctctgaaatctgtgcctccttgttctcacttggacaactccctaccttgtgagcagactctagggagcagtaaggttttccttttctctttcagggttttttttttttagacagggtctcactatggtgcccaggttggaatgcagaggctattcataggtgttatcatagcacactatagcgtctaactcctggcttcaagagagcctctcatctcagcctcctgggtagctgggacgatgggcgcaccactgcacctggctttatttttcttttaagaaggtattgtgtgatgctcagactgacagtgtgactgatgctctatagaagtaataggctatcatccttgtcagtgactgaggggcctccaatcagcatgtctcctcagggccacctgcttccttttcctatccagaagagagagaacaatgctgcgtgtgtgtgtgtgtgtgtgtgtgtgtgtgtgtgtgtgtgtgtgcgcgcgcgcgcgsatgtgtgtgaaggagagagggggcggggagagggagagagggggagagagagagagagagagagagagagagagagagagagagagagagaagagatagggtctggctgtctggctttgttgcccaggctggagtgcaacggtgtgattgtggctcactgtagccttgacctcccaggctcaatcgatcctcctactcagaatcccaagtaggtgggactacaggcatggaccaccatgcctggctaatttttaatttttttgtagagatgggatctctctatgttgaccaggctggtcttgaattcctgggtccaagccatcctcccccttcagcctcccaaagtgctgggattataggtgtgagccaccgtgcctagctcactgttgcttttgttgttgttgttgttgagatgtttctctttttaatttttttcttaatttttaatttttgtgggtacataggtgtataaatttggaggtacatgagatgttttaataaggcatgtaatggttaataatcacctcatcgaaaatggggcatccatcccctaaagcatttatcctttgtgttacaaataatccaattatactctttcagttattttaaactgtacaattaagttattattgactacagtcactctgttgtgctatcaaacactaggtcttattcatttttctttttttttggtacccattaaccgtcccacctccccaccccttccagactctggtaactatccttctactcactatctccatgaattcaattgttttgtttaaatctttttccttttttttttttttgagatgtagtcttactttgtcacccaggctggagtacagtggcacgatcttggctcactgcaacctccgcctctcatgatcaagcaattctcgtgcctcagtctcctgagtagctgggaccacaggtgtgcaccaccatgccggctaatttttttattttttatttttagtagagatggagttttcctatgttggccaggctggtcttgaactcctgacctcaggtgatcctcctgcctcagcctcccaaagtgctgggattacaggcatgagcctccgcaccagccaatctcacaatctcattctttttaatggctgaataatattccattctgcatatgtaccatattttcttttcttttttttttttttgagatggagtctcgctctgttgcccaggctggagcacagtggcgtgatctcggctcactgcaagttccgccttctgggttcacgccattctcctgcctcagcctcctgagtagctgggactacaggcgcttgccaccacgcccggctaattttttgtatttttagtagagatggggtttcaccgtgttagccaggatggtctccatctcctgacctcatgatccgcccgcctcggcctcccaaagtgctgggattacaggcgtgagccaccgcacccggcccatatgtaccatattttctttatccattcacctgttgatggacacttaggttgcttccaaatcttggctattgtgaatggcactgcagcaaacatggaagtgcagatatctttttgatatactgatttcctttcctttgggtacatacccagcagtgggattgctggatcatgtggtagctgtatttttagttttctgaggaacctccgaactgttatccacagtagttataccactgttgctttttgagggtcccatcaaacttcagggcaatttgccaactgtatgtggaggttttcttgggaaggatctggagcttttgcactgcggtgaggggtgatgcagacttgagaatcctgtggcatggctggtcctggaggattagcagaatcccccttttgagggttgttggcttttcttcctgatctgtttcttctggttcctctgctctcacatctccctgtgttgacctgagctattgcatgtagccaagtggcctgcagcaatctgctggtgggcaggtcttgctggatgcagtgttggcccactctccatgcccaacctgacatcaggtctcaggcttctgccagctctccaagaggaccttactgtggtaaatccaagttatcacagtctttactcgtctgttgagtctgtgggcctgaaccccctcagggtactggagaacctccctttcttttttttttttgagacagaattttgctctgtcacccaggctagagtgtggtggcgtgatctcagctcactgaacctctgcctcccaggttcaagtgatcctcctgcctcagcctcctgagtagctgggattacaggcacctgccatcacgtccagctaatttttgtatttttagtagggacagggtttcaccattttggccaggctggtctcgaacctctgacctcaagtgatccaccttctttggcctcccaaagtgctggattacaggcatgagccactgcgcctagctaggaggacctccccttctgaaccagttatggtatcccagggccaggaagaagctgaaagccttctgtgggaacaaaacaaagcaaaacaaaaacgcttcatggggcttccaccaaagttagtgttttaaggcacgcctcaggaacagcaacttggaagcaggttgttccaggaagtggttgtaggcagatttttcctgagttcttcccctgctctgagggctcattaaatcttcctctgagaagctccacttttatcttcattttacagatgggacaaccaaagctaaagagaggctaaggctcaaaagtcagagttagctagttggggcatttgggtgtgggcccaggccacgtaacttcatctgttgttctaagcctgaagccaagcccagagttaggtgttctgtatggggagcaaggtgtgaccatcttcctgggaccattagtctgcttgggaggccggtcatgacagtccagggcaaaagatgctgtcacaggatctcaagacaagatgctctagggaagagaaaagggagtgcccgctgtgtgtcaggacttgtgctaggctctaaacctcaggcaggaaagcatgggcaatgagccagaggctgctgtggcagcacagactgcggtacctcgaggctagtaagggacaaagcgtgggaagctgggatagaggctcctcacactctgaaaccagcaggaggaggtgcgagacccagcacctccatttctagaggtggcgtgaccttggctcggcctcccctctctgagcctcagtttcctctccagagtgaactgggggctgcaccccccttctcccagagtgggggacaaaaaaacgaatagcacaccgctgagattccctgtgtgtgcgcaagtgtatgacaagacgccgccggtaccgcacgagggccagggacgcagagaggccaagggcgctccggcctcgtagtagccagcgaaaactccgccgccagccactccgggaacgaagcgcatgcgccaacccatgccgtcacagtcacgtgccccacgctttcggcagaggccctgagaggcagactctgactgacacgtgagctgacctgtcagcaggaagcacttcccctggcgacgagcaaaaagactgttgattggggatagcaccccctcgggggcgggttctttgcagtcctggttactatgacgcccggcccccgccccctcggctagccgccatcttgttgttgatccgtacccagtgggcagcgccgggagctggaccaagcggccggtgagaggccgctgtagcggtgctcagccacctgtgctgcctgccagggggcgggccgaaacctggaggcccggggggcccagctcccgtaggagccgtgggcgctcggtgcccgggccgggcaggtgagtgacaggagccgggccgatannnnnnnnnnnnnnnnnnnnnnnnnnnnnnnnnnnnnnnnnnnnnnnnnnnnnnnnnnnnnnnnnnnnnnnnnnnnnnnnnnnnnnnnnnnnnnnnnnnnnnnnnnnnnnnnnnnnnnnnnnnnnnnnnnnnnnnnnnnnnnnnnnnnnnnnnnnnnnnnnnnnnnnnnnnnnnnnnnnnnnnnnnnnnnnagcctcccagatgctggcaccgaagccggggggacagccggtgtggaggacggagagcgccagtgcctgagggttggccggctagtagcgggaaaccagcttctctgaccgaagctctggactccgctgatccggagcgctaaagtgtgtccggtgccaccctgatgctctcctgggagttatgttgctcctggctgagaaatagacttacctctttcttagatagcgttcctgcgagtgattttcaggacgctggatgctaagactagacgaagcaagccaaagcccccgcgagccaggcaggccggtgtcacggccctatgattatggcaagggggaccctctgcctggctgctgcttcctgagacccgttcggaacctcacgtgtacctcgaagctcaccgttttcctcgcaaagaacctggttaaatgtccataatggctgagttttattttggaacataatttctttggttcttcaccaccactttttggagagtggtaatgtcttcctctttttgctttaggagaaagtgagtattatggtgatgacttgattttatctcctaaagggatgctcgccataggagacaaaggaaacgtaggagtgtsttagaatcggaaaaagaaacttgtttttgttgtggatgatatggaactggcaaattaactgttttttttcttttttttcttttgagacagagtctctcgctctgttgcccaggccggagtgcagtggcgcgatctcggctcaccacagcctccacctcccgggttcaagcgattatcctgcctcagcctcccgagtaggtaggactacagacacgcgccaccatgcccggctaatttttgtatttttaatagagacggggtttcaccatgttggccaggctggtctcgaactcctgacctcgtgatccacccccccttggcctcccaaagtgctggggttacaagtgtgagccactatgcccggcgcaaattaacttttaacagtactaaaattatcttgctcagtgaaaacaccttcaagcccctttcctgtgaatttgggcaagttggagatcctcagtagagtgtgcaggtctaggaagagttctcattgctccaaaacacatttctcttgacctgtggcctctttggttctttgtacagtcttcttgtatgtggtcatagaatatgcctgcatgagatgactaagaagtcaagcgacaatactttgtgcactttttgttttgttttgttttgttttgtttttttgagatggagtcttgctccgttgccaggctggagtacagtggtgccatctcggctcactgcaacctctgactccctggttcaagcaattttcctgcctcagcctcccgagtagctgggactacaggcacgtgccaccacacctggctaatttttgtatttttagtagagacggggtttcactatgttggccagactggtctcgaactcctgacctcatgatcaacccgcctccgcctcccaaattgttgggattacaggcatgagccaccgcgccaagcctactttttttttttttttttctgagacgaagtctcgttctctcacccaggctggagtgcaatggcacaatctcagctgactgcaacctctgcctcctgggttcaagcaagtctcctgccccagcctcccaagtagctgggattacaggtgcgtgccaccatgcccggctaatttctgtatttttagtagagacctggtttcaccatgttgttcaggctgatstcgaactcctgacctcctgatccgcctgccttggcctcccaaagtgctgggattacaggcgtgagccactgtgcctggtcacgcgcctagcctactttgtgcacttctatcaggatcttgtcacctctgaatgtataattttgaaagaggccaggtgcggtagctcatgtctgtaatcccagcactttgggaggctgaggcgggcggatcacctgaggtcagtagttaagagattagcctatccaaaatggcraaatcccatgtctactaaaaatacaaaaattagctgggcgtggtggtgcatggaggctgaagcaggagaatcacctgaacccggaaagcggaggttgcagtgagctgagatcgcgccactgcactccagcctgggtgacagagtgagactcagtctccaaaaataaataaataaataaataataaataaaataataattttgaaagaaaccagctccttggtcaggagatcctttaggaaagcaggtgctgaacccagaggacactggcagcttgttgctgttcgactgagtttatactgcacttgtgaggcaagggagaagttgagtagtctttagttatttatttcattgtccttcagggccattttttgaatctttagttcattataatcttggtaagaccagttccttgggcagttcttgaaaggagggggatattaaaatattagcttttctttctttcttttttttttttttgagacggaatctcgctcggttgcgctggctggagtgcagtggcatggtcttggcttactgcaagctccacctcctgggttcacgccattctcctgcctcagcttcccaaatagctgggactataggcacctgccaccatgcccggccaatttttttgtatttttaggagagacggggtttcaccgtgttagccaggatggtctcgatctcctgacctcatgatccgtctacctcggcctcccaaagtgctgggattacaggcgagagctactgcacccagcaaaaatattagcttttcaaaattgtcccaagcccctgctttttttttttttctgagacagggtttcaccatgttggccaggctggtcactcctgacaggtgatccacctgcctcagccttggcctgggattacaggggtgagacaccacactggctgtcatttgcatttttaaaaattacttatgtagagatggggtctcagttgcccagactgggcttgaactcctagtctcaagtgatcctcctgtcttggcctcccaaaatgctaggattacaggcatgagccaccatgcctggcctttttttttttttgagacagagtctcactctgtcgcccaggctggaatgcagtggcatgatcttgtctcactgcaacttccgcctcctgggttcaagtgatactcctgcctcagcctcccgagtagctgggactacaggagtgcgccagcacgcctggctaatttttttttttttttttttttttagtagagccggggttttgccatgttggccaggctggtctcaaactcctgacctcaagtgatccacccaccttggcctcccaaagtgctgggattacaggtgtgagccaccacacctggccacgcctggccttttttaagagacagtctcttaaaaacctcctaggctggagtgtagtgacacaattgtagctcactgcagcctccaactcctgggctcaagtgatcttcttgcctcagcttccaaagtagctaggactacacacatgcgccaccatgcctggctaattttctttgtcttaatttttttgtagagatgggggtctcactatgttgctcaggctagtctcaaactcgtgggtgcaaatgatcctcctgcctcgggttcctaaagtgcaggcatgagccactgtgcctggcttgtgatgggcatttttaagtgcaaatgtgtcagactgttgttataatagtagaccctccaggccgggcgcggtggctcaagcctgtaatcccagcactgtgggaggccaaggtgggcgggtcacgaggtcaggagttccataccagcctgaccaacatggtgaaaaaccgtctctactaaaaatacaaagattagccaggtgtggtggcgtgcacctgtaatcccagctactcaggaggctgaggcaggaacaatcacttgaacctgggtaggtggaggttgcagtgagccgatattgcgccactgcactccannnnnnnnnnnnnnnnnnnnctttgcataatttatctgtaaactttagtatttttatttacttaatttttttttgagacaggtcttactctgttgcccagctggagtgcagtggcatgatcatagctcactgcagcctcgaattcctgggctcaggtgattctcctgcctcagcctccagagtagctggaactacaggtgggcacaactgtgctcagctaatttttaattttaatttttttttttaatggacatgatgtcttgtttgttgcccaggctggtctctaactcctgggtttgagtgatcctcccacctcggcctcccaaagtgctggattatgaatgtgagtcaccttgcctggccaatttcaggagtttttcacactgtacagactacggagatcctgcactgaaatcaggaactgctacaggcttatgggatgagatctgatgtcctaatgtggcatttaaggtgatatagtccagctggctccaggctacctcctcagggtttatcctaatccccactaaccaaatggtttgctaaacattccatacatactctttctctgcacaaatcctctcatggctgaatccagtgacctatggcctgtggagatgaccttttgcttcagcttttcccttgtccatagtccagctccatttctacctaccttctttataaaacgtccccaaaacatttctgctcctggggatatatttcataccctttgaactgcagttacattattgctctgaaacaaacatcaaaatagtatttgctcttttaagaataattttttaggccggcacagtgggtcacgcctgtaatcccagcactttgggaggccacagcgggtggatcacctgaggtcaggagttcgagaccagcctagccaacatggtgaaactctgtctctactaaaaatacaaaaaattagtcaggcgtggtggcgggtgcttgtaatcccagctacttggaagattgaagcagtagaatcacttgaacctggaaggcagaggttgcagtgagctgagattgcrccactgcactctagcctgggcagcaagagtgaaactctgtctcaaaaaaaaaaaaatcttttttgtttcctctggtagggcctaataatccttttctgacagggactgtattttacactttttgtgtctttttgcgcctgtacgtagtagatgaggaccaaatatttataaagatgtactagatttgtctgagttggaaacaccttttgtaattaaacagggaaatagaagggagtgggcaagtagaagtggggatttggtggctatgaatttctgcctccaccctgccttgccttgaagtgcttgcatatgttaactctagtgctttatagaggcaggcccatcccttagtgctgcagaacagagacagaacttgctcaaagggcagaactaaggcctggaaagagcccttcctggttaaagtgccacttttctaggaaaacatttctgtgagcatggcactggatgcaaacatttttaggcccttttctttgttgtggcttgatctcactgcctccttgggctgctgtaaatggcagtatttgctgcctgccctcctcccagtgcagccctgacgctataaggaacagtgatgggcagagctggggaaagacgcacagtacactcttgtttctgacttgcaacaaggaagcagtcaggcattttgtgtctttgtggctctggatctgtgcttttgcactaatttttaaatataggttttcatttctcctactacagcagaatttgagcaatagattctgggtaggaaagcctaagactgtgtgtgtgtgtgtgtgtgtgtgtgtgtgtgtgtgtgtgtgtgtgtgtgtatgaaagatgataaagattctcgtgtgctactgtggtttgaagttacgtttatttagaagatgtaacaaatgagctttgatgggaacacatgttcacttcagtgctggatctctgttagggactttgttttgttgagtgcctagaaaatctgctgatctcttttgtaaaattttatttgtgggtttagcttatttattcctgtctcattatataaaaggagggcagggtaggggagcaggtctaggactggactcttttcaagtctaaaattcaatgttgatgaataagagcatcttataaatacataaaaatctaggtgtaggccaggtgccgtagctcatgcccataattccagaacttttggaggttgaagcaggcaaattgcttgggcccaggagtttgagaccagcctgggcaacatagtgagaccccatctctgcaaaaaaaaagtaaaagttaaacgagcatagtggcattcacctgtattctcggctacttgggaggcaggggcgggaggattgcttgagcccaggaggttgaggctgcagtgagccttgattgtaccactgcattcctgcctggatgacagagcaagaccctgtctctaaaaagaaaagaaaaatttgggtgtattatgattgaatgaacaatcattaaacaacttactctgtagtaaaaaaaatcagatgatgtcgtatgttgatggaaatatggagaaattagagacctcatacattgttggtgggaatgtcaagtgggccacttgggaaaacagtctttatgtggttaaacatagagttaccatatgacccagcaatctccctcctggctatctacccaagagaaatgaaaacaaatgttcacacaaaaacttgtacatgaatgtttatggcagcattattcataatagccaaaaggagaagcaacccaaatgtccatcaactgacagataaaatgtggtgtatacatacaagggaacattactctgcaataaaaaggaacgaagtgtgatacatgttacaacatggatgaaccttgaaaacatgttaaagtgaaagaagtcagatacaaaagttcacatttacatgattccatttatgtgaaatatccagaataggcaattctatagaaacagaaagtacattagtgattgcttagggcttggaggtggttgtaggggatagggaaaaagatagcttaagagtatggaatctctttttgagatgattaaaacattctaaaattgtgatggttgctcctatttctgaatattttatactttttttaaattttatacttaaaatcattgaattgtacaccttaatgggtgaaccgtatgatgtgtgaataatatatcaataaagctgttaattaaaaacgtattggnnnnnnnnnnnnnnnnnnnnnnnnnnnnnnnnnnnnnnnnnnnnnnnnnnnnnnnnnnnnnnnnnnnnnnnnnnnnnnnnnnnnnnnnnnnnnnnnnnnnnnnnnnnnnnnnnnnnnnnnnnnnnnnnnnnnnnnnnnnnnnnnnnnnnnnnnnnnnnnnnnnnnnnnnnnnnnnnnnnnnnnnnnnnnnnnnnnnnnnnnnnnnnnnnnnnnnnnnnnnnnnnnnnnnnnnnnnnnnnnnnnnnnnnnnnnnnnnnnnnnnnnnnnnnnnnnnnnnnnnnnnnnnnnnnnnnnnnnnnnnnnnnnnnnnnnnnnnnnnnnnnnnnnnnnnnnnnnnnnnnnnnnnnnnnnnnnnnnnnnnnnnnnnnnnnnnnnnnnnnnnnnnnnnnnnncatgcccagctaatttttgtatttttagtagagacgaagtttcaccgtgttggccaggctagtcttgacctcctgacctcaagccatccacctgccttggcctcccaaaatgccgggattacaggcatgagccaccacaccttgccaagaccctgccttttttttttttttgagaccgagtctcactcttgttgcccaggctggagtgcagtggcgcgatctcagttcactgcaacctccacctccagggttcaagtgattctcctgcctcagcctcccaagtagctgggatttacaggcatgtgccagcaygctcggctaatttttgtatttttagtacagacggggtttcaccatgttggccaggatggtctcgatctcctgaccttgtgatccactcgccttggcctcccaaagtgctgggattacaggtgtgagccaccacacccagctgagagaccccgtcttaaaaaaaaaaagtcatttcactgttaaagaaaatcccctgcacaccagaaatggccagctgatctctgatctttgacctttatgctttatcattgttttttttgtttgtttgtttgccacagagtctcgctctgtcgcccaggctggagtgcgtggcgcgatctcagctcactgcaagctccgcctcccgggttcacgccattctcctgccttcgcctcccgagtagctgggactacaggcgcctgccaccacgcccggctaatttttttgtatttttagtagagacaaggtttcaccatgttagccaggatggtctcgatctcctgaccttgtgatccgcccatctcggcttcccaaagtgctgggattacaggcgtgagccaccacgcctggccctttatcattgtttttaaagaaatttccaactttattgtggtataatttttctttttttcttttttttttgagatagagtctcgctctgtctcacaggctggagtgcagtggcgcaatctccactcactgtaacctccacctcccaggttcaagtgattctcctgcctcagcctcccgagtagctgggagtacaggcatgtgccaccacgcccggctaattttttgtatttttagtagagatggggtttcactgtgttagccaggatggtttcgatctcttgacctcaggcaatccatccacctcggcctcccaaggtgttgggattacaggcatgaaccactgcacctggcccaacagatgtctatttcacttcattgaaaagatttctgtttttggagacagagtcttgctctgtcaccctgattggggtgcagtggtgccatcttggctcactgcaacctccgcctcctaggttcaagtgatttttgtgcctcagcctccagagtagcagggattacaggcatgtgccaccacaatggactgattcttgatttttttagtagagatggggttttgccatgttgaccaggcttgtctcgaactcctgacctcaagtgatccatccaccttggcctccccaagtgctgggattacaggcatgcgccactgtgcccggcccagtgaaaagatgtcagttagtcatagaaggtactcttatttccctttccagtcaaccccagcctgctttcttggacacagacaggtgccaatctttctatcactgtagattaaatttgcgtttcttagaagtttcacataaatggaatcatattaatatacagtcgatcctcattattcacagagtttgtattttcaagtttgcagacctgctaaaatttacttgtaaccccaaaatcagtacttttggtgcttttgctatcatttatagatgtgcacagagtgacaaaaattttgagttgtgtgttcctagctgaggttaaacaaggcaacatgctgctgccttcttttcaattatcatactgtaaataagtgtccttttcttggtctatttagtaccatggttttttgcatttatttgctttttttttttactgagactgagtcttgccctgtcacccaggctagagtgcagtggtgctatctcggctcactgcaacctccgcctcccaggttcaagtaattttcctgcctcagcctcgcgaatagttgggattacagacatgcaccaccatgcctggctaatttttgtatttttagtagagatgaggtttcaccatgttgtccaggctggcctcgagctcctggcttcaagtgatctgcccatctcggcctcccaaagtgctgggattacacgcgtgtgccactgcacctgtcctgatttactttttgttggtgatttttaatgtttattttcatttttatttattttaccagaaaataaacactaactttattaatgtaatagcaacagaaagggtttccaatttctcagaaggaaaataacatgacaatagcgcaagtgttaaaagagtaaatggctacatttcttgttctgatagcttcccaccatacaccaaaggttcttcaaggacagctgccaccagagctgctgcaagatcatgtttttcactgggtgtagcttcacagtcaactcctcaagcagaagactaaaatattatttcttagaagatcttggttgagggagaacatatcaatatggagaacagatctttgcttctcaaattcaagaaaaaccattaactaatctatcaatttttctccaatacagtgtgccagagtgctctgtgaagaatccttttccatccctaccacatgtctgggtgaagggaggggagggttggtaagctgccaggacactagcaggcactcctggtgatgctctgggctctgctccctttctgccgggagtagcaggcatcttttctagccgctgcagcagcttgatgttgtggggaggaaggggccacccaccaatcacctcttcttgaagctgcatttttttgtgttcrtagaagaggtctgtcttagagctccccaaattgacaatctttgggcagccatctctatccttctcctagatggtgcactccttacagtaataggcaccagagaccccagggcctccacagatcacacggcacccctgctaagatacgtagttacactcatcacatagcacaccagagtgcagggacgcacaaagtcacaaatcacacacttgctgtcacatttttcacacaatcttccaatgacaacaccagctggcttgcagcaaaagatcaaattaggatgatgtttagccatagttcccaatgaagccggccgctagaagcctatttttttattttttcgagactgcttacaggttgttagccactgcgcctggccttgttggtgattttgatgcttaaaatgrcccccaaacgtattgaagtgctgcctggtgtttttaaacacaagaaggctttgattaccttacaaggaatgtgtagggaagttttgttcaggcatgagttataatgctgttaactatagttcagtgttaatgaatcagttatttatattaaataakgtgtttttaaatagaaacatacctaaaaggttttatattgtatgtatgtagatctggaaggttgtatattaattggttaatgaaaatatgactagatcatcttctactggctgagagtttattaaacaaaaaaaaaaaagaaattatgaccagaggcctacaggaacttaaccatttattttgtctaggtgcagtgactcagtattcaataactcagtgtacacaatgactttataaaacataattaccatcaataatgagaattgactgtatagtttcttgtgtcagagccctagctaagtgttctagactttaatgtctgggagccacagacagtgcttttgttgataagtattcatcccttaaattccctctcccattaaaagtcatttccacaggtcacctattatgcatagctgaatttgtaatatttcattgttttaccattaacttcttgggccatactgactttcagttctctgaaggcaggaattatttttgtcttgttagtaataatatactacatggtcttactctgtagatactcaatatgtatttgatcatgtaagtacttaaattttttttttcttttttttttttttttttttttgagatggagtctagctctttcgcccaggctggactgcagtggcactatctcagctcactgcaagctccacctcctgggttcacgccattctcctgcctcagcttctcgagtagctgggactacaggcacccgccaccgcacccggctaattttttttgtatttttagtagagatggggtttcaccatgttagccaggatgttctcgatcctcctaacctcatgatccgcctgccttggcctcccaaagtgctgggattacaggcatgagccactgtgcccggcctgcaaatttaaatttaatggtccctgactaatttggagactttatagttgcaattcggacaaaaaattggtttggtggtgagtattctggttttatgtgtgtgttgtgtgtgtgtgtgtgtgtgtgtgtgtgtgtgtgtkttttagagagagtcttgctaatgttactcatgctggtctcgaattcctgggctcaagtgatcctgctgcctcagcctcccatgtataccaccatgcctagctagtgaatattctgaaacttatttataaagacttatgctcaacttgaagatgttgtatggatcagggtcaagcagcatgctaggcaggatatacataggctattttggtttactgtttttggtactttacctggagacagtgcagcaaaaattaaagtgagttcactagcatagaaaatataatgaatattaaaaagcttcttctctatttgggaagatgtattataaaatatgtggctatcttttttatttattaatttttgagacggagtcttgctctgttgcccaggctggagtgcagtggtgcgatctcggctcactggctcactgcaggctccgcctcccagggtcaygccattctcctgcctcagcctcctaagtagctgggactacaggcgcccgccaccacgcccagctaattttttgtattttttagtagagatggggtttcactgtgttagccaggatggtctcgatatcctgaccttgtgatccacccacctcggcctcccaaagtgctgggattacaggcgtgagccaccgcgcccggccagtatgtggctatcttacatattttgcaggtgtctctaaagtaagtgctgaccttggtgccagggagcccatattaagtttgagtaatttcatgaagcagagtgtaccaggcaggaccacttggacccttaagcatattaacttgactgtttacagtattacttttcattggtagaattgggactatatacaaaattattaattggccaggtgcaatggctcatgcctgtaattccagcactttgagaggctgaggcaggaggatcagttaagcttagaagttcaaaaccagcctggacaacccagcaaggcccgcttatctaccaaaaaataaacaattagctgggcatggtgggacatgcctaaaattccagcaactggggaggctgaggtaggaggatcacttgagcataggagttggaggctgcagtgagcagtgatcataccactgcactcctgcctgggtgagagtgagactctgtctttaaaaaaaaaaaaaagctcaagagttcaagaccagcctgggcaacgtagtgagaccctgtctctatgtaaaaaaaaaaaagaattattaactgtaacagagactggagtaatgagaaattggctagtcagaagtagagagaggctgggtgtggtggctcatgcctgtaatcccagcactttgggaggctgagatggaaggatcacttgagtccaggagtttgagaccagcctgggcaacatggtgaaaccttgtctctacaaaaaataaaaaaattagctgggtgtggcagcatgtgcctatagtcccagctactagagaggctgagatgggaggattgcttgagaccaggagatggaggctgcagtgaatcatgatcgtgccactgcactttagcctgggtaacagagtaagaccctgtctcaaaaaagagaacgctctagaatataagaagacaatatatgtatatatagccttctatatatatatattttatatattatatagtcttcctatatattatatatataaaatatattaagttaaaaaggaagactatataacatatatattacatatatatgtgttacacacacacacacatatatatatatatatatttttttttttaagggaaagggtcttgttttgtcacccaggctggagtacagtggtgcaattatagctcactgccaccttgaacccaccttgggctcaagggatcttcccacctcagcttcccaagtagctgggactacaggtgtgcactgctgcacccagctaattaaaaaaattttctgtagaggtcttgccatgttgcccaggttggtctcaaactcttgggctcaagcgatcctccctctttggcctcgcaaagtgttgggattacaggtgtgagccaccacgcctggccactcttgagtaaggtttctttcacacagtgtagtgttttaatttatacatgctgttgtctgtatcagtagtttatttttattgctatatagtatttcattgcattaacactacagtttgtttattctgttgatagatatttgggctgtttccagtgtttgccttatgagtaaagcttttatgaacttttttgcaaaggttttttgtgtggacatacacattcatttctcttgaagagactagaattgctgggtcataggatagatgtatgtttagctttataggaaactataataccttttccaaaatggttgtaccatttttacactctcaccagtaatgtatgagagttgtggttgttccacatttagcaacattaagtgtattgtagtgtgtttttaattttagccatttgggtgaaagtatagtggtaactcattgtggttttaattttcacttacctgaatgctaatgatattgagcaccttttcctgtacttaatggtctttgtgtatcttcgtttgtgaagtatgtattcaaatctgttgcccatttttttttaaaattggcttttttattttttaaagaaatgtatcttttagagatagggcctccctatgttgcccaagctggacttgaacttctgggctcaaaggatccttctgcctcatcctctcaagtagctgggactataggtgttcaccactgtgcctggcaggggtttttttttttttttttttttttgttactgagttttaggaagtttttttgtattctggatactatattttttgttttttgttttgtttttttagagacagggtcttgctctgttgcccaggctggagtgtagtagcgtgatcataacttagtgtaccctctaactcctgggcttaaacgaccctcctgcctcagcctccctagtagctaggactacatgtgcatactaccatgcccagcttattttctttttaaaaattttttgtagcaacggaggtctcagcatatttgcccaggctgatcctgaactcctgacctcaagcattcctcttgcctgggcctcacaagatgctaggaatacgggtgtgatcaagactccatctcataaataaataatcagaggttttcaattttgatgaagtccgatttatcaataatttctgttatggttattgttttctgtgttctgtctgagtgtctgaggacaccttgcctacctcttaagtgttggacatttctagcaaggcttgaagtcaggtagtgtaaatcatataactttattttttttgagacagggtctggttctgtcacccaggctggagtgcagtggcatgatctccgctcactacaccctccacttcctgggctcaagccattctcccacttcagcctcccgcgtagctaagactacaggtgagctctgcacaccttggcctcccaaagtgctggtattataggtatgagccaccatgcccagcctaactttattttttgtgttttcacctacaagctttctagttttagcttttacattttggtctctgagtcatcctaagttaatttttgttattgtgtgagattggggctggtgtttctttttcccccacatagataactgattgttccattactagcaacatttgttgaaaagacttgtgtattatctattgctctgtaayaaattattccaaaacttagcagtttaaaacagcaaacagttattacctcagtttctgagggctaggaattcagaagtggcccaggctagagtgaagtggtgatcacagcttactgcagccctggcctcctgggcttgagtgatcctcccaactcagcctctcaagctggaactacaggcatgcaccaccatgcagggctagttttttctatgttttgtagagatgttgcccaggctggttttgaactcctgggctcaagtgatctttccctgttggcctcccaaagtgttgggattataggcctgagccaccatgcttggcttagaggatctgttttcaagatgacttattcataaagctctttgcaggaagcctcagttccatattgtttatctctacccagggcttttgtttgtttgtttttaaattttccctactttaaagctaacaagttatacacagggctctttgagtttcctcatggcgtgcagttatctcctacagaaatgatctaagacaaagtaaggaagaaaccatgaagcctcttatgacctagtcatacactgtcacttctgccatattcttttcattagaatgagtcmctaagtctagcctgtactcaaggagagaggaggatttcactttttagagggaagaatgtaaaaaaatttgacatagtttaaaactaccaaaattttctctccccattggtttgctttggtacttttgtcgaaaaacaattgactgttatatcctgatttgtcgctggcaaaaatcccaaaaacaattgactctgtagatatgggcctgtttgtgaaatctgtgttctgttccattgatctatttgtttatccatatgccagtaccccactactgtagctttataggaagtcttgacatgaggcagtgtaaataacccaactttattgtttatcaagatttatttgaatattacagtttctttttattaccatataaattttagaattagcttgtcaatttctgtaaaaaagtctcctgccattatggttgagattccactgaatttatagattcatttggggagaattgacatcttaactatattgagccttctaatccatgtgctgtgtgaggcatatttcttgatttatgccttctttactatcttgctacattatttcattgtttttaatgtagaattctttcacgttttgttaaatttgacccaagacatttgatttttttgatgctattgtaaatgaaatttttaaattgtagtaaatatacatgagaaaatgtagaattttaactattttgaagggtatgatgcagtggcattaaatacattcacaatgatgttttgagaactactttcatcatcccaaataggaactctccccattatatagtaacaccccattctcacctcccccagccccttgtacgttcttaataatctttttgtctcaatgaattcgcctattttattttattttatttttgagactcagtctcactctgtcaccgaggctggagtgcagtggcccagtcttggctcactgcagcctccgcctcccaggtttaagtgattctcctgcctcagcctctcaagtagctgggattacaggtgcccgccaccacggccggctaatttttgtatttttggtaaagatggggtttcaccatgttggccaggttgatctcgaactcctgacctcaagtgatccacctgcctcagcctcccaaaatgctggaattacaggcttaagcaactgtgcccagccctgttttattttatgtaagtggaattataattatataattttttcccttttgtgcctggcttatttcacttagcaaaatgttttcaagattcatccatgttgtgacatgcatcagaatttcattcctttttaaggctgaataatatttcactgtatgtatataccgcatatctttatccatttatctgttgatggacatgggtcgtagacaccatttggttattgtgaataatgctgtgaacattggtgtataaatatctgttttggattcctcctttcagttcttttgggtatagacctaaaagtggaattgttgaatcatatggtaattctatgtttaactttttgaggaattgccatactgtcttctttacattctcaccagcagtgcacaagtgttacaatttcttcatatccttgccaacacttattttctattttttttttttttttataacttggatgtgaagtagtttctcattgtggctttgatttgcatttccctaatgactaatgaagttgagcatctttttgcatattttttggccatttgtaaatcttcagagaaatgtctaaggcctttgcccatttatgaattgggttatttttgttgttgtcgagttatacaagtactttatatgttccatgtattaatcctttatcagatgtatgatctgcagatattttctgctattctgtgggtgatgttttcactctttttaaattaattaatcggttttttagaatagagatgggatctcactatattgctcagggtggtctcaaactcttgggcttaagtgatccacctgcatcagcctcccaaagtgttgagattacaggtatgagccactgtacccagactaattttatttttttaaggtgggggtattattattattattttttnnnnnnnnnnnnnnnnnnnnnntgagatggagtctcactctgtcacctagcctggagtgcagtggcgtgatctctgctcaccacagtttccgcctcccggttcaagtgattctcctgttttagccccccgagtacctgggattacaggcacgtgccaccacaactggctacttttttgtatttttagtagagatggggtttcaccatgttagccaggcttgtcttgaacccctgacctcaggtgatctgcccacctcggcctcccaaagtgttgggattacaggcgtgagccaccgcgcctggccaattattattattttttaagagatagggtctcatcctgtcacccaggctggaatgagtgatatgaatgtagctcactgcagcctcaaactcctgggcttgagtgactgcctgcctgcctcagccttccaagtagccgagactactggtatgagccagtgcaactcagctgattttttaaaaataaaaaaaaaaattttgtggagatgggatcttgttaagttgcccaggctggtctcaaactgagcttaagcaatcctcctgccatggcttcccaaaactgtaggatttcaggcccttggatttctttcyttttttttttttttttttttttttttgagacggagtcttgctcttgtcaccccggctggagtgcagtggcacgctcgctgcaacctctgcctccagggttcaagtgattctcctgccttagccttccgagtagctgggattacagatgcccaccaccatgcccgctaatttttgtatttttagtagagacggggttttgccatgttggtcaggctggtctcaaactcctgacctagtgatctgctcgcctcagcctcccaaagtgctgggattacaggtgtgagccactgtacctggyygatttctttcttttttttttttaagatgaggtctcgttctgtcacccaggctggagtgcaatggcacgatcttggctcactgcaacctctgcgtcccgggttcaagtgattctcctgcctcagcctcctgagtagctgggattacaggtgcccaccaccacacccaactgatgttttaatttttagtagagacagagtttcaccaggttggccaggctggtctcgaactcctgacctcaagtgagccacctgccttggcctcccaaagtgctgggattacagttgtgagccacagcgcctggcgtttctttttttttagacagagtttcgctcttgtcacccaggctggagtgcagtggcgcgatcttggctcactgcagacttgatctcttgggctcaagtgattctcccacctcagccagactcccgagatgctgggactacaggcatctgccaccacacccagcgaatttttgtgctttttgtttttgtttttgtttttgtttttttgagatggagtcttgctctgaagcccaagctggagtgcagtggtgcaatctcggctcacggcaagctccgcctcccggattgacaccattctcctgcctcagccttccaagtagctgggactacaggcgcccgccaccacacctggctaattttttgtatttttagtagagacgggctttcaccatgttagccaggatggtcttgatctcctgacctcgtcatctgcccgcttcggcctcacaaagtattgggattacaggcgtgagccaccgcgcctggctttgtgtgttttttttttagatatggggtttcgctgtgttgcccagtctggtcttgaactcctggtctcaagtgacccacctgccctagccttccaaagtgctgggattacaggtgtgagccacagtgcctgggtaatgtagatttttacatagtttatgtatcagttgactattaagtggtatatgaaaaagagataaatgataaaccaaaggtacagtgacagcggccctttttttttttttttttttaagacgagtctcgctctgttgccaggctggagtgcagtggcgatctcagctccctgcaacctctgattcccatgttcaagtgattcttctgcttcagcctcccaagtagctgggattacaggcacgtgccaccatgccctgctaatttttttttttttttttttttttaagtaraaacagagtttgaccatgttggccaggatggtctccatctcctgacctcatgatctgcctgccgcggcctcccaaagtgctgggattacaggcgtgagccaccacgccctgcctacagtggcttttatgtttacttatgtagttacccttaccagtgttctatattttttctttttctttttagctactgtctggtgtcccttcattttagcctgaaggactccctttagcatttcttgtagatctggtctagtagttagcaactcccttagtctttatctggaaatgtcttaatttctctttcattcttggatagtattttcagatgtagaattcttggttgacagtattttcctttaggacttatatatgttatcctactgccttttggaggtttctgaggagaaatctgctgttaatctcgtttaggatcttttgtacttgaggcatcagttttctcttgctgctttaaatattcattcttgtcttttggtttcaatagtttcataacacgtttttgttttataatgtgtctcatatgggtctctttgagtttatcctatttgggttcattgggattcttttttttttttttcaagacagagtttcactctgtcacccaggctatagtgcagtggtgcaggttgctcactgcaacctccgcctcccaggctcaagtgattctcatgcctcagccttcctagtggctgggattacaggtgtgcactaccacgccaggctaatttttgtatttgtagtagacatgggattgtgccatgttggccaggctggtcttgaactcccgacctcaagtgatctgcttgccttggcctcccaaagtgctgggattacaggcatgagccaccacacctggacttcattgggattcttgaatgtatatagttgactcttgtacagtgtgggggttggggtgtcaactccccacacagtcaaaaaacctgcatataacttttgactccctcagagcttaattattagtagcctactgttgactggaagcctcactgataacatacacaatcaatatataatttgtttgttgtatatattttaaaatttttctcgttttagrcacttgcttcgttgcccaggctgcagtgcagtggtacaatcataacgcactgcagcattgaactcctgaaattaagcaatcctcccacctcagcctcctgagtagctgagactataggtgtgcatcaccatgtctggctattttttttttcttttgtagaaatggggtctcactatgttgcccaggctggtctcaaactcctgggctcaagtgatcctctcacgttcacctcccaaagtgtgcaattacaggcatgagccaccgcacccagtagctatagggttttcataaataccctttattaagtgaggaagaagtttccttctatctttagtttgttgagaggtttttttggaaacagtcttgctctgttgcccacactggagtgcagtggcgtgatcttgactcactgcaacctttgcctcccgggttccagcaattctcctgcctcagcctcccgagtagctgggattacaggtgcccgccaccatgcgcagctaatttatttttatttatttttagtagagacggggtttcaccatgttggccaggctggtttcgaactcctgaccccaagtgatcctcccgcctcagcctcccaaagtgttaggattacaggcgtgagccaccacacccaacctgttgagagtttttaattatgaatgggtactgaattttgtcaggtttttttcctgtatttattgagatgattacatcttatggcttttctccttatttctgttaatatgatgagtagtaatactgattgattctttagatgtttaatcaaccttgcatttcccactttgtcatgagggattctttctatatatcattggaattgttttgctaaaaatttttgaagatttttgtatctgtattcatgaaggacattgttctaaaatcttttttcttatttattttgttaaggttcttttttaggttttgttattagaaataattgaccttggccgggcgcggtggctcatacctgtaatcccagcactttgggagcccgaggcgggtggatcacgaggtcaggagatcgagaccatcctggctaacacggcgaaaccccgtctctactaaaaaatacaaaaaaaattagccgggtgtgtggcgggcgcctgtagtcccagctgctggggaggcttaggcaggagaatggtgtgaacccgggaggcggagcttgcagtgagccgagattgcgccactacacttcagcctgggtgacagagcgagactccgtctcaaaaaaaaaaaaaaaaagaaataattgaccttggccaggcatggtggctcacgcctataatcccagcactttgagaggctgaggcaggtggatcacttgaggcaggtggatcacttgaggtcaggagtttgagaccagcctggccaacgtggagaaaccccgtctctactaaaaatacacaaattagctgggcgtggttgagcgctcctannnnnnnnnnnnnnnnnnnnnnnnnnnnnnnnnnnnnnnnnnnnnnnnnnnnnnnnnnnnnnnnnnnnnnnnnnnnnnnnnnnnnnnnnnnnnnnnnnnnnnnnnnnnnnnnnnnnnnnnnnnnnnnnnnnnnnnnnnnnnnnnnnnnnnnnnnnnnnnnnnnnnnnnnnnnnnnnnnnnnnnnnnnnnnnnnnnnnnnnnnnnnnnnnnnnnnnnnnnnnnnnnnnnnnnnnnnnnnnnnnnnnnnnnnnnnnnnnnnnnnnnnnnnnnnnnnnnnnnnnnnnnnnnnnnnnnnnnnnnnnnnnnnnnnnnnnnnnnnnnnnnnnnnnnnnnnnnnnnnnnnnnnnnnnnnnnnnnnnnnnnnnnnnnnnnnnnnnnnnnnnnnnnnnnnnnnnnnnnnnnnnnnnnnnnnnnnnnnnnnnnnnnnnnnnnnnnnnnnnnnnnnnnnnnnnnnnnnnnnnnnnnnnnnnnnnnnnnnnnnnnnnnnnnnnnnnnnnnnnnnnnnnnnnnnnnnnnnnnnnnnnnnnnnnnnnnnnnnnnnnnnnnnnnnnnnnnncagtggcacgatcctggctcactgtaacctctgcctcccgggttcaagtgattcttctgcctcaacctcccaagtagggcaagtagctatgattacaggcgcccgccaccttgccagctaatttttgtatttttagtagagacggggtttcaccatgttggccaggttggtctcagtctcctgacctcatggtccgcctgcctcagcctcccaaagtgccgggattgcaggtgtgagccaccacacccggcctgttctttcttaaagatgcttgtggctcttgcctgtaatcccagcactttgggaggctgaggtgggtgaatcacttgagtacaggagtttgagaccagtctgggccacatgatgaaatcctgtctttacaaaaaatacaaaaattatctgggcatggtggtgcatacctgtagttttagttactctcagggctgagctgggaggatcgtttgagcccaggaagcagaggttacagtgagccaagatcgtgccaggccacttcagcatgggcaacagtgagaccccatctcaccagaaaaaataaatgaaagagagagagacagggtttcactctgtcacccaggctggagtgcaatggtgcaatcatggcttactgtaacctcaaactcctggtcttaagtaatctcggtgcctcagcctccaaactgggactgcatgtaccaccatgcctgcctaattttcattttttctgtagagacagagtctttctctgttgaccagggtgctcttgaactcctggcctcaagtcatcctcctgccttggtctcctgaaatgttgggtttacaggtgcaagccatcacacctggccttttttytaagttgttaatgagaaccttaggttattaatttttttttttttttttttgagacggagtctcgcgctgttgcccaggctggagtgcagtggcacgatcttggctcactgcaagctccgcctcccgggttcacgccattctcctgcctcagcctctcaagtagctgggactacaggygcctgccattgcgcccggctaattttttgtatttttagtagagatggggtttcaccatggtcttgatctcctgacctcgtgatccgcccgcctcggcctcccaaagtgctgggattacaggagtgagccaccacgcccggccaggtcattaactttataggttttttcttttggagatggagtttcactctgtcgccaggctggagtgcagtggcacgatctccgctcactgcaccctccacctcccgggttcaagtgattctcctgcctcggcctcccgagtagctgggactacaggcgcccaccaccatgcccagctaattttttgtatttttagtagagacagggtttcaccgtgttggccaggatggtctcgatctcttgacctcgtgatccattygcctcggcctcccaaagtgctgggattacaggtgtgagccaccacgtccggccagttttacaggttttttgcaatacttttagactttaaaacgttagcattgctttagctgaatcagtatagcatatatttgaaaagtgttttttcatatattacctcactctgagaagtagataagtaatctcaaatctgttgacagggaaaataggtgaattggcacattgaagggtacataatttgttaattgtggcattgattttttcacatggtttctgactcccagaatcctgagagctctgcatgttcaggctgtttaattcctgatgtcacatgagagtcaggaaaggaagttgagggagtggagaaatttggagaaatttggaaactgctcttaaggaatgatgtatctttggaaccacctctccgctttttgcttttcacttttttttttttttttttttttgagacgaagtctcactctgttgcccaggctggagtgcagtggcactatctcggctcactgcaacctctgcctcccgggttcaagtgattctcctgcctcagcctcacgagtagctgggattacaggtgcctgccaccatgcccgactaatttttgtatttttagtaaagacggggtttcaccgtgttggccagactgttcttgaactcctgacctcaagtgatctgcccacctcggcctcccaaagtgttggaattacaggcttgagccactgcgtccagcctccacctgtctgcttttctaagttgggaagttgttgatgggtttgcgtaggtgaaggttagtccccatctctctgaaactatgggttgtctatgaggtggacagaagtgcttttctaatatttaaagtacttaacagtaataattaggctgggcatggtggttcaggcctataattgcagcactttgggaggccaaggcaggaggatcacttgaagctgggagatggagaccagcgtgggcaataaagtgagacctcatctctacaaaaaaaaggaagggaaaatagctgggtggcctgtagtcccagccactcaggaagctgaggtgggaaggatcgcctgagcccaagaattcaagttgtagtaacccgtgatcgtgccactgcattccatcctgggtgacagagtgagaccctgtctcgaaagaaagaaaaaacaataattctggtatttcactagagggttggaagacagctggaatctaatctgcttgaagcagtcaaacttgatggcattttgtgaggcattatgctggttgttcaccccttgttataggttttcttcacgtatttacttcacatagtctactaatttccatgttgctgatctgcttctgggtaacctttaataaagtcgttttttgttgttgttgttgttgttttgtccacctagtctaagactctaataaaatctttatctacatgatggatgttcaaatagatggtcattatgttgcctccaggatgtgtggtgtctgaaagagggagtttctgtagagtttgtgccctgaaatctccttacactgttttctaaatgtctaactatataagaaatatgctgtttggcccttgagatggaggtccaataggaacacaggatgctaggaacttggtccttggaggagagaactggagctggtccctggccatatgtgggagtaacagcacattatctcaaaagaataaaactcattggagttgtattttgtggtggacgttttgccttagtctctaactgcagctgaatacatctgtgtctgtgtctgaagaatttgatctttgactatattttcagataatcttcagagtagtataagcatcaaggcatttaaatgatttcacccccaaaggaagagtcctccagattttagccatatctgatttttagtgcctctcagaattcagtgatttaaaactgctttggagtcctaacagttttgtggtgtcattgagataccatagaaagatagaaggtattttttttttaattgtttatttatcaagataaactatttgctagcccacatattcatgtttcatagttcaggaacacaggttagtgacaaaactaataggaaattcaacccaaagaaactgttgggtttkttttttttttgagacagagtctcgctctgtcatccaggctggatcttggctcactgtaacctccgcctcctgggttcaagcgattctcctgtctcagcctcccagagtagctgggattacagacatgcgccaccacacctgctatatttgtatttttagtagagatgaggtttcaccatgttggtcagactgatctcaaactcctgacctcaggtgatctgcctgcctcacctcccaaagtgttgggattacaggcatgagccattacgcctggccaaagaaactccttatattccaaaattactttgcactctgaaagatactagcttttctcatctaaaattctttcatgaagtcataatttctgtagaaatctgggtatgccttctttcttggttcagccacagcaaatttacagagaactacggctcccagggatacaacgaatgctccaccaatatgaaactgcagacgtgctgtggtagttactgtccttgataggtatgtcagcctcattaccagtgttcttcctggctgatggagaagtggatggccagcagctatttcatagttgtataattccttactctggagagttttcttgtttaaagctagtaacctttttttttttttttttttttttgagatggagtcttgttctgtcaccccaggctggagtgtagtggtgcgatctcagctcactgcaacctccgcctcccaggctcaagcgattctcctgcttcagcctgtcgagtagctgggactgactacaggcgcccgccaccatgcctggctaatttttttgtacttttagtagagacggggtttcactgtattagccaggatggtcttgatctcctgacctcgtgatccacctgcctcggcctcccaaagtgctgggattgcaggcgtaagccactgcgcctggccactagtaaccatttttgatagggggtcctaaataaagcccccagataatctaaaaaggtcaatgctgtgaccagagctttggcttcacctttcctagatgtatgaaattttattgccatgttttcccttttttaataataggacacatgtgaatattgctaatataaggtagtagatttgtacctaagatgaactccatgtataaaaccagtgttatagataattgaaattagcgtgagtgacaagagcttttatttgtgttctgaaatggagagagagcagtttttttattttttatttttatttttgagacagggactcactttgttacccaggctggagtgtagtggcgcaatcttggctcactgcaacctccgccttccaggctcaagcaatcctcctgtctcagcccctcaagtagctgggactataggcatgagccaccaagcctggctaattttttttttgtagagacagtattttgccatgttgcccaggctggtctcaaactcctgagctcaggcgatccacacatctcagcctcccaaagtgctaagattacaggtgtgagccaccctgcctagcagagatagtagaggtttttcaaaagataacatggtgaggagtaattccccagtagggaggtgtgtacaccattctcccagtaaccttagagcttgtttacctctgccttagtcctgtcaacttgtccccactgtgcttaacgttttcagttaagctacagtaggatagtggtgaagaaaaggagtcagagtttaccattcatgccagaaacctaatgtgtgagaccaggcttttgcatctatctttcagttgtatggaagcttctctcttcagctttggtcttcagtgggattggtgataggaaataagtccaggaggctcatcatttcacatgtgagcagtttagacagtttaattttaagtgctctgtggttttgtgttccttttagaaccatttctcccatccttctacatgtgtgctttctagatttgaccatattttcattcagttgtaaatgtgctaggtgagacttagctgattcagggatggctcgcatgtactattttgtcacagcacaggtaatccagtggcttcttattaaagcataatcatgagcagagaatgtttcagcacctttgtttctcctttctttcttttttctttctttttttttttttttttgagatggagttttgcccttgttgcccaggcgctggagtgcaatggcgtgatctcggctcacctaaacctctgccttctgggttcaagtgattctcctgcctcagcctcccaagtagcgggattataggcacccaccaccatgcctggctaattttttgtattagtagagacagggtttctccatgttggtcagactggtctcgaactcctgacctcaggtgatccacccgccttggcctcccaaagtgctaggattacaggcatgagccactgcgcccggcccttctcctttctttttgtgcatttcattttgatttcccctgtatcactttgaacgtcagttctgaaaattcttcacatatctcctttcccccacttcttagtacatttgacacagctgatgtcaaaagggtctttactaaaaaatgtatttagggaagcacatatttctaatctttaggaatccagtaaaaacaggaaagaggttcagtggactctagattctctccttgacctaaattaattctgttcttgctgttcgttgatgggctggcacatctcaggtcccctgctaagtttccttttttccttgttccctgtttgttcttagccaggtggcctcaggatgccatggtttcctagctcctgtgataggacccaggaatctaaacaatctttcatnnnnnnnnnnnnnnnnnnnnnnnnnnnnnnnnnnnnnnnnnnnncagccctacttacatgaagaacactccctatgtttcccttctcctcacggtacaggaggattgttctctctcaccctcataactatgcctaatctatatcagtgtctacagtctcatatacaaagggaagaatgggcttgaatttaagaaatcattggattcccttggttgtaagatttagaggacaaacgtgttttcatgttggttttctgctatagtgtttttgtctgtgattcttgaaggtgttttggtatcttttcctgtcaaagtccatgtcaatgcttttttatttctgaaattaattagaaattagttttcataaaatccagagctgtatagcccaagttttatgtgttgttcttttctgttagagtgacttatcagtttattttctcttcagctcttttcagttcaattagttttattatttttcctttggattgtatcatacagtaaaaaacaaattaaagacacatttgccaaaaccaaaaatactgttgccagaattttacttagcattcctgacttaccaagtttaactttaattacacaaattttatgaattttaaaaagggtatgatactttgtcatggtacctatagtgcttaagtggatatatttaattttagaagaggtaatagaaatactggatttataaactaatttttaatgaaatgttgaggaaatctgcaaatatacctgtgaaatgtgaaggcactaaaggtgcttcactttattctataaaaacattgcaaatgtggctgggcatggtggctcatgcttgtaatcccagcactttgggaggccgagacaagtggatatcttgagctcgggagttcgagaccagcctgggcaacatggtgaaaccctgtctctacaaaaaaaaaaaaaaaaaaaaagccaggcttggtggcacacacctgtgttttcaactacttggaaggctgatgatatgggaggatcacttgagcccaggaggtcgaggctgtagtgatgtagtgaactgtgttgtgccactgcaatctagtctggacaacagtgtgagaccctgtctcaaaaaaaaaaaaaaagattgcatatcaaacccaagtggttaatctgaggttgtaaaaatatgttggccaaataatttggaattctaactgaacttcttagagtatatacctgctgatctgcatttttagtgtgtgtctgtgcctgcccaactaaagaatctggtgaccaggtattgtcttgcaattgctgtagagacagtgccttcctagctcttamagtagtcctgaccttgttcgccactatatctgattgcagtctctttttccctgccaaggttttttattcattgtcactttctaggcttgatgtgttgttgcattaaaataaacacacacaaaaaaaaactcataygatttctcctaaatttggttcaacaagttctttagtctggttcttctccttactatcattattattgtcattgagacagcatcttgctatgttgcccagactggtcttgaactcctggcctcaagcagtccttccaccttggccttccaaagtgttaggatgacaggtgtgagccaccatacatggcctgattcatcttttttttttttcccctgagacaagatctgaatctgtcacccaggctggagtgctgtggcatgatttcagctgattgcaacctccacctcctgggctcaagccatcctcccacctcagtctcctgagtagctgggactataggtgtacaccaccacgcctggctaatttttgtaatttttttttttttggtaaaagtgaagttttgccatgttgcctatgctggtctcaaactcctgggctcaagtgatcctccagccttggccacccaaagtgttaggattacaggcatgactaccacagctggcctgattaatcttttatagttgagattatttatgtgtttgcctgatttttttccccctttttaatctcttttgtatcattgataaaaacagtctaattctcctcctcataggctgtctttttccttctgtattttgctttgattttgtccttgttattgtggctattctcatttgggtgcatttaaacctatttttccttcatatatcaaatcttaaaagagttaaaacacaattttatgttctttttatttgctgacttcgaattctgtcatgtggccaacatattttgtttttcataaagccacatgacccgtttgttctggtttttgctaggtctaggttagaaatgtaaacttttttggtttataaccctaatattttaaaacaaaaagaacttgtccctttataaacactttttcatatgttatatatttaccctactatatacatctgttatgtatatcataaacatacatatatttattcagccagatttattgtgtagttactatatgccaggtactactcagggcacttaggatactcatataactgacatcatcatcataaataataaacagtagacattatcagtaagtaaagtatgtaatatgccagaaggggataaatgccttaatgaagaaaagaaaaagaagagccaattaaagggggtggagggtgcaggtggtggtgtattttaaactagggagggtaggatagacctttcattgagaaagagacattttgatcaaagacttttgaaggaggtgagggagttggccatgtggttatctgggggaagaatgtttaggcagagggaatgactagtgcaaagaasctagggaatatatatatgcctgatgtgtttgaggaacatcatgaaggccagtatggctggagtgggataataagcagtggggagacaagggtaggaagtgaaggcagagagaaaatgggggtgggaaggaatgcagakcttgtggactttttattttttgacagtctcatggcaaaaagtgaaatggcggccaggcatagtggctcatgcctgtaatcccagcactttgggaggctgaggcaggcaggtcatcttgagktcagaagtttcagaccagcctggccaacatgacaaaaccccgtctctagtaaaaatacaaaaataaaattagctgggcatggtggggtgcgcttgtagtccccacctacttgggaggctgaggcatgggaattgcttgaacccaggaggtggaggttgcagtaagccaagatcgcaccactgcactccagcctgggtgacgaagtgagactctgtctcaaaaaaaaaaaaaaaggctaggcgcagtggctcacgcctgtaatccccagcactttgggaggtctaggcgggcagatcacctgaggtcgggagttaaagaccagtctggccaacatgagaaaccccgtctctacggtaggagaatcacttgaacctgggaagtggagattgaggtgagccgagattgcaccattgccactccagcctgagcaacaagagcgaaactcacacacacacacacacacatgcaaaagtgaaatggttccttgggttttttttttttgagatggagtcttgctctgttgcccaggctggagtgcagtggcgcgatctcggctcactgcaagctctgcctcccaggttccacgccattctcctgcctcagcctccygagtagctgggactacaggcgcccgccaccacacccgtctaatttttttgtatttttagtagagacggggtttcactgtgttagccaggatggtctcaatctcctgaccttgtgatccacccgctttggcttcccaaagtgctgggattwcaggcgtgaggcactgcacccggccaaccctgtctttaaaaaaaaaaattttttttaagttagccgggcatggtgaatatacttgtagtcccagctattttggaggctgaggtgaaaggatcccttgatcccaggagttagaggctgcagtgagccatgaccatatcattgtactccagcctggacgacagacccccaactctaaaaaggaaaacaacaacaaaaaattacatttcattaacatgagaaacttctttttacttgaatggagacataattccttttggaattcaatggtatgttcaaggagtttgttattataaccagaaagtcaacctaactattgtaactaatatttttgcagtaaaaatttctttccatttgttgcaattcaccagtgagaaaaaaatcagaatctcagcaagttcttttcatacatagcgttctttgcattttacgcaataattatcttaaaatatgtaactaaagtattacaaagcaaacaaaggacagagtctctattgtagctgagaggtgcataaactcatagcagagcaatggaaccccataacctcttggggagcagatactttgcagttggctacctgaataagattggggctctattagcaatgaagtagcagagaaagacgttatgcaggcaaccaacatcatcatcatctacggccttctcrgacagtagttttcacagtagcctctgtggacaccagacttcaggagtaacctctggttgataaaaaaaaaagtcagggttgggcatggtggctcatgcctgtaatcccagcactgtgggaggctgaggtgggtggatcatgaggtcaagagattgagaccatcttggccaacatggtgaaaccccgtctccactaaaaatacaaaaattagctgggtgtggtggcatacacctgtaatcccagttactcaggaggctgaggctgaggcacgagaatcgcttgaaccctggaggcagaggttgcagtgagccgagatcgcgccactgcactccagcctagcgacagtgagactccatctcaacaacaacaacaacaacaacaacaaaaaaaggagtcagagccgttgctatttccagggatgggcactaggcgaggcaagcccaagccctttacctgcatctgcaaatcctgcagggttaggagtgtgaggagacttggagaagttaagtgacttatgaggctccatccacaccttgtaaagcaaggcttcacagagcttgagagggttctggggtacttccactatttcagatttcagggttattaagaaagtaccatcaaaacagagttacagatatgtggtatatttactcttaggagactatttcaaacacaaaaacaatgccatgacttcatgttgacatcatatggaaacaaataccaaatgtctagatagactgaagagtggactctgccctcagtcctgtggaagctgcagaagttgccacagatctctcagagtcaggggaagggctatttcaatttttttttttttcttttttgaggagtcccgctctgtcgcccaggctggagtgcagtggcgcaatctcggctcactgaaacctctgccttctgggttcaagtgattcttgtgcctcagcttcccaagtagctgagattacaggcatgtgccaccatgcccagctacctttttttttgtatttttagaagagacggggtttcgccatgttggccaggctggtcttgaactcctgacctcaggtgatccgtccgcctcggcctcccaaagtgctgggattataggcgtgaaccactgcacccggcctatttccttgactctcctcctgcaccattcttctgggtcacctggcactgtgacccctatcttttcccagccacccaatgactcaggctagaaaatttagcactctccttgtgtccatagtcagaagcattcccagggagaagcacagccagagataggcctccttcagcctgaccggggccagggcagaagccaatctacagtactgaacaggatccacagctgcaatgaccacctccagagaccctgacctgccctccacaatccagcaactctatttttaagtatttactacgtggtggaaactgccttggacttttgctgtggaaataagagacaatggtttggtggtgatgacagtgagttaatagatgacagcacagtggtatattgatatggtagagctggcatagggtaccttaggagtcatagatgtgtgcactatactcaggtttggagagaatggagtctaggaatactacctggggcagagttgccttgacctgaaggcagtattgccttgtcccaggtagtattcctagacttcattcaggataactaggcaaaaaaaaaaaaaaaaagaagtgtatgtgcattaaaatagtgcaatctggggactgggagtacagaataattgattttggtgatagcagtgaaataaaacatagctagctgcctgggcagctttgggttaagattttgcagttttgcagtagttttttctttctttttgtcttttttgagacagggtcttgctctgtcacccaggctggagtgcagtagtgccatcacagctcagcagtggtattttgtaccccattttgtccataattacaagatccaggaaaaacaacaacaacaaaaaacccgatggtttgtctcttacatatgggaccatattcctgctctactaatactttttcttttttggtcttaatctttctgatgtattcttgctgactacattcctaatttaaaaatacactcagtgttaagaaatttgccaactactttaaatattttgagagaaaattgacattataaagagggagtttgagtacaaggagcttttccttgtcccactggttggtatagagtcagacagaaagggaatggtcataaattgacaaccatagatttaaagtagaagaaatctgaagcctgaattcctttgggaaaagcaaaaccttaatgatcctatagcaggggtccctgggtactggtccatgacctgttaggaactgggcctcacagcaggaggtgagtggtaggcgagcaagcaagcaaagcttcatctgtatttacagctgctccccttgcttgcattaccgccggagctctgcctcctgtcagaccagcggtggcattagattctcataggagcatgaaccctattgtgaactgcacatgtgagggatctaggttgagtgctccttatgagaaactaatgcctgatgatctgtcactgtcttccatcaccccaagatgggaccgtctagttgcaggaaaacaatcttagagctcccaaggattctacattatggtgagttgtataattattttattgtatattacaatgtagtaatagaaatacaatgtacaataaatgtacagcctcaatcatgctgaaaccatcgcccccacacccgttctgtggaaaagttgtcttccatgaaactggttcctgctgccaaaaaatttggggaccactgtcctacagctcagcaatgaatggcctgcctggtccttggcaccttcagtggagaatttgggaatctcatgtgacctaattcctcagacagaaacccttcctctgagtgaaggagagacccttaccagtactggatatcctaaggagtctgaacagaacaaattcccattgccttctgtttttttctgatctcatctttgggtgtgaagtaaaccgggataggtgctttcctgatggttgtaatgtgctgtagctctaaaataaaatcctttagataactcagaagggaggtgggaactaggaaaggcagagaatgtgggcttctgtgcacaagatagatggaagaggccaaggttgcatcattcagcaaaaatttaaccaactgcctttcatgtgccacgtagtattgtacgtgctagggatacacatagtagggaacaaaacaagagtccctgctctcactcatggagctccagggaaattgtgactcacccagtgttttgattccttcttcctctcttcttttctgtaggacagaataataagctgaatagaatctgaccattggctttcacctggccaggaccttctatgtagctctccttttgtggcccatgtgctgcatcctctgccctcagtgtgcaactggcccccaacgcaatgtgtgtttgtcaaaccatggaagtggggcagtatggcaagartgcaagtcgggctggagaccggggagtcctcctggagcccttcatccaccaagtaggcggacacagcagcatgatgcgttacgacgatcacactgtgtgcaagcccctcatctcccgggaacagcgcttttacgagtccctccctcccgaaatgaaggagttcacccctgaatacaaaggtcagtcaytggccagtttaatgaaagcagcagccttgggcttatagaccccttgccacagttttttcttggtttgtttgccatgatatatcattgtaggtcttttttctcaaagcaygaagtcactttgttagataaaattagaggctgaaagcatcagcaaggtctttagatcttgaaaattgaatttattaataggtaaagctgagaaaaagtcatagcattaagttccattggtggaaaagagcatgctgttgtcagtgaattttcccatttgctgtgacactagtctgggagagaagagggaacatttctctcgtcccggaggcggaatggatacttccaggttaaagcggttagatagctggcagtggtgctgtgtgtatcctgtgtctatatgtgctggggcaaagaattgttggtaagaaatgcagggactttctggggcctggaagtcctgatatttgaaggaaraataatttattttaaaatataagtcaactttatagaaaagaacctcatgaatattaattataccagaattaactaactttattttaaaatctgatctttgtcagtgtttataaatttttatgattgctcattgtgtctaagttttttttttacattctgctttataactttaagttgtatgatttcagtcaggttaacactgtcctttacttaggagagtttcaatttagaaaaaccagtgctatagaattgactttttgtttccttaactttttaaaaaaaattttggtaaaatgtacataacataacattcaccattttaaagtgtataatttagtggcattaacacattcacaatgttgtatagccactgtccatttcctgaatttttcatcatctgaaacaaactcggtacctattaaataataactccccattcttccatcatctgatcccctggtaacctcttgtttactttctgtctctacagatttgcctattgtagatatttcataaaagtgaaatcattacaatttttgaccttttgtgtctggcttggttcatttagcttaatgtttacaaggttcgttcatgtcatagtgtgtattaaaactccattcttggccgggcacagtggctcacatctgtaatcctagcactttttttttttttttgagagtttctctctgttgccaggctagagtgcagtggcgcgatcttggtttactgcaacctccaactcccgggttcaagcgaagcgattctcctgcctcagcctcccaagtagctgggattacagacatgtgccaccacgcccagctattttttgtrtttttagtagagacagggtttcaccatgttggccaggatggccttgatctcctgaccttgtgatccgcctgcctcggccttccaaagtgttgggattacaggcgagagccatcacgcctggccagtcctagcactttgggaggacgagtgtgaggccctgtctttccacggcacccatgggcaaaagtagtcccagggacattgccttggttggggaagcccctaggctggacagatcacctagcccagggtgtgctgggctcaagccacccgagccctaacaaggagtcactgacacatttcctggaagcaaaggctaagaagcatnnnnnnnnnnnnnnnnnnnnactgtctcaaaaaaaaaaaaaaaacaacacttcttttttttttttttttttttttttttttgagacggagtctagctctgtcgcccaggctggagtgcagtggtgcgatcttggctcactgcaagctctgcctcctggattcacaccattctcctgcctcagcctcccgagtagctgggactacaggcacccaccaccacgtctggctaatttttttgtatttttattagagacagggtttcaccgtgttagccaggatggtcttgatctcctgacctcgtgatctgcctgcctcggcctcccaaagtgctaggattacaagcgtgagccaccgtgcctggcccacttcattcttttttatggctgaataatatttaattgtaagtgtataccacattttgtttattcattcatctgttgatggacacctgggttgtttccaccttttggctattgcgaataatgctgctgtgaacattgtcttacaaatgtccatatgagtcactgcttttaattcttttgggtatatgcctaggggtggaattgtcagatcatgtggaagttctttgtttacctttcggaggaactgccaaactgtttcccacagtggctgcaccactttgccttcttaccagcaatgtacaagggtccctatttctccacatccttaccaacactccttttcttttctttttgtagccatcctagtggatgtgtgtggtatctgtggctttgacttgctttttcctaatgtctaacgaatgatgcagaggatttttttgttattgtctgttggtataccttcttaaagaaatgtctattcaagtcctttgaccattttgaattgggttgtttctgtctttttttttttttttttttgagacagagtcttgctctgtcgcccaggctggagtgcagtggcacgatctcggctcactgcaatctccacctccgkgttcaagcgattcttcwgcctcagcctcccaagtagctgggattacaggcatgtgccaccacgcctaactaaattttgtatttttagtagagatggggtttcaccatrttgggcaagctgctttcgaactcctgactttaggtgatttgcctgccttggcctcccaaaatgctgggattacagtcatgtgccaccatgcctggctaatttttgtatttttagtagagacggggttttgccatattggccaggctggtctcaaactcaactcaggtgacctacctgccttggcctcccaaagtgttgggattataggtgtgagccaccatgactggcctgggttgtttcttaattggcagaaagaggtgaaccagtttttaggacatctcaagctttttaaatttcatttttattttaattaacctcagggattttacttatgcttggaatgttctttccagtacccttatccacacctgctcctccaacctttagtttattaggtctccccagacacttcttccctgatcatcctatattatattctgctctggaaaccatattttcagtgatagaaccttacttagtttcttcatagcacttatcacaatctgtatttttgtctatgtgtttgtttttcacattagtatggaagctccttgaaggtatggacttttttttttgtcttttacacttatgagttcagggcctggcatctagtagatggtcagtaaatacttgataaatgaatgaggcaaagcttatttgcataaatgtacagaagccttgaacttcacatttagtactgcaagcactaacagttgatgattgtagctggtcatactaaataaatgaaaatttgtttttaaacctgccaagatatgaaatattattgacactttttcttagcttaattgagcttaaacacctgtgctgatagcagcaattagatgtgtgtatgtgtgtgggctagtaatcatacatgtatttcttagctccatgtgctgaaagggcctaaaagcagtgatacttcagtagcaatcagtatatctagtaaccaaatcctgagttttctaaataccattcttacaataaaaagaaacagagctccttggtgaaatggttggttcctgagttcgggcaggaaaattataagacaagcctagaacatcttatggtgacagatagtaaagaagtggtcaaaaatcatgtcagaagtacgaagagctaactttaaaggaattgaagggcccaatctagaagaatttaaatgacaaaatatccacaagtctatactgataaatacatggatatgaagggacaactcttccttatagaattctaatttcctttttttttttttttttttttttttgagacggagtctcgctctgttgtccaggttggagtgcagtggcgcagtctcgcctcactgcaagctctgccccccgggttcacgccattcttactgcctcagcctcccgagtagctgggnnnnnnnnnnnnnnnnnnnnnnnnnnnnnnnnnnnnnnnnnnnnnnnnnnnnnnnnnnnnnnnnnnnnnnnnnnnnnnnnnnnnnnnnnnnnnnnnnnnnnnnnnnnnnnnnnnnnnnnnnnnnnnnnnnnnnnnnnnnnnnnnnnnnnnnnnnnnnnnnnnnnnnnnnnnnnnnnnnnnnnnnnnnnnnnnnnnnnnnnnnnnnnnnnnnnnnnnnnnnnnnnnnnnnnnnnnnnnnnnnnnnnnnnnnnnnnnnnnnnnnnnnnnnnnnnnnnnnnnnnnnnnnnnnnnnnnnnnnnnnnnnnnnnnnnnnnnnnnnnnnnnnnnnnnnnnnnnnnnnnnnnntgatccacctgcctcggcctcccaagtgctgggattacaggagtgagccaccgtgcccggccagaattctgatttattttgattaataaatatagaaggaatgatgggaatagaagtcaccattaggcagacaacacagtaataccattcagcacacaccattaggcattacacacaccattagacattacaacacagtaataattgtggcgcattgtgcagtggtgcaatcatacctcactgcagcctcgaaaccatggctccgccgggcatggtggctcatgcctataatcctagcactttgggaggccgaggcaggcggatcacctgaggtcaggagttcgagaccagcctcgccaacatggtgaaaccctgtctctactaaaaatacaaaacttagttgggtgtgctggcaggtgcctataatcccagttacttgggaggctgaggcagaagaatcacttgaacccgggaggcagaggttgcagtgagcagagaccacgccattgcattccagcctgggcaacaagagtgaaactcttgtctcaaaaaaaaaaaaaaaaccaaaaaaaaaaaactatggctcaagtgatcctcccacctcagccccccgagtagctgggactataggcacgccactacaactaggtaatttttaaagttttttgtagagacagggtcttgctctgttacccaggctagttttgaactcctagcctcaaggaatcctcccaccttggcctctcatagtgctgagatttaagagatcggayctcactatgttgcctgggctagtcttgaactcctggtctcaagtgatcctcctccatgaggcatgatacctcagcctcccaagtagctgggatcacaggtgtgagccactgctcccagctgaaaggtaagtgtgtgtgtgtgtgtgtgtgtgtgtgtgtgtgtgtgtrtgtktgtattttgtttttgttttgagatagggtcttgcttcattgcctaggctagagtgcagtggtatgaacttggctcactgcaacctctacctcctgggttcaaggacctcagcctcctgagtagctgggacttacaggtgcctgccaccattcctggctaatttttgtatttttagtagagatggggtttcaccatgttggtcaggttggtctcgaactcctgaccttaagtgacccacttgccttggcctcccaaagtgcctggatacaggtatgagccaccgtggctggactgtgtgtttttttaatataaaattttagtccaatttatttatttatatactattttgagacagggtctcactctgttgcccagactggaatgcagtggcacgatctcaactcaccacagccttgacctcctgggctcaagtgattctcccacctcagcctctggagtagctgggaccacaggtgtgcaccggctctttttttttgtattttgtagagacagggtctcaccatgttgcccaggcgggtctcaaacttctaagcttaagtgatctgcctgccttggcctcccaatgtgctggrattacagatgtgagccaccatgcctggccctgaaatagattaatttgactaataatatcttccactatgcttctatttttttttctttttcttttttgagatggagtctcactctgttgcccaggctggagtgcagtggcgcgatcttggctcactgcaagctctgcctcccrggctcacgccattctcctgcctcagcctcccgagtagttgggactacaggcgtgtaccaccacgcccggctaattttttgtatttttagtagagacagggtttcaccgtgttagccaggatggtctcaatctcctgacctcrtgatccgcccccctcagcctcccaaagtgctgggattacaggcgtaagccaccgtgcccagcctatgcttctattttctttgactaaattgggcttcatttgacttagaaagaagggattaattttagtttaattgaattgtacttttgagctagcatatttattctttcctagtgaaaatgtagcctaagcaaagaaaataaagtagatcctaagaatttactgtggcttttatttttttatttttattttgagacagggtcttgctgtgtcgcccaggctggagtgcagtggtacagtcatggctcactgcagactcaaactcctgacctcaagcaatcctctcatattatggcctttaaagatacctgttactcagtttgagaggaggaaggtgtgaggaaatactgaaccagtgctagagactgccaacccttccctgggaggcaccttgaagttctaaattgtcttgtcccagttctgatggttgtaatttagagaacacctatctggaagcagggctcatttaccttttaagggattttttccttagcatcagaaggactccatgagctgacagggcctatagttttatttctggctttggcatatttatggcagaatgtttggccttcagtgttttgaatgtggatggataggtggctgaagctacatttataaagtgtttgggactgttaaagtttcctagccacttggagaaagcagtgtgtttatttctggctttgttcttatttagcagccttagaatatttatttttccaaatttagtattcttctgattatgttttgaaagcaataaaaatcacccagtttcaaaactgcacaaagggcttgaatagagatttttccagagaggacatacagatggccagtagcacatcaacatgattagtcattaagaaatgcaaatcaaaaccaaaataagataccacttcataccaggtatcttattttacctagtatggctataatagtttaaagaaaaaagggaaataactgttggcaaggatgtggagaaatgggaacattgctgatgaaaatgtaaagtggtgtagccactgtggaaaagagtttggcagttcctcccaaaggtgaacacagaaaccatatgatccagcaattccactcctacatatatatccaaaacaattgaaaacagggactgtggccaggtgcagtggctcatgcctgtaatcctagtactttgggaggcgggcagatcacctgaggtcagtagttcaagaccagcctggctaacatggcaaaaccctgtctctgctaaaaaatacaaaaagtagccgagcgtggtggcaggcacctgtaatccccgctcctcaggaggctgaggcaggagaatcacctcgggaggcggagattgcagtgagctgaggttgcaccactgcactccagcctgggcgacagagcaagattccatctcaaaaaaaaaaaaaaagaaaaaagaaaaaacagggattcaaatggattgttgtaagccagtgttcacaacagcatcattcataatagctaaaaggtggaaacaacccaagtgtccatcaatatagataatacataacagatgtgatatatacttacaatggaatactattgagccataaaaaagaatgaagttctgatatatgctgtgacacagatgaaccttgcaaacactatgctaagtgaactaagccagacacaaaagaacaaacattgtatgatttcacttatatgaaatatgcataataggcaaatctgtagagatagaaagtagatttggttactggggctaggaggaagggaaaatggggagttactgcttaatgggtacagcatttttgtttcaggtgatgaaaaacattttggaaatagataatggtggtggttattcagtattgtcaatgtacttaatgcccactgaattgtacctttaaaaatgattaaatggctgggcatggtggctcacaccagtaatcctagcactttgggaagcgaaggcaagaggattgtttgaggcccggagttccagaccagactgggcaacatagcaagccttgtcgctaccaaaaaaaaaaaaaaaaaaaaagaattgcaaattttatgtttctatcgatcgatctattgactgaacaccacaacttatttttatttttatattttatagagacagggtcttgctgtgttgctcaggctggtcttgaactcctgtgttcaagcagtcctgccttggcctcccaaagagctggaattacagtgtgagccactgaacctggcccaaacaccacaattttattttatttttattttatttttttgagatggagtgttgctctgttgcccaggctgatcttggctcactgcaacctccgtctcccggcttcaagtgattctcctgcctcagcctcctgagtagctgggattacaggcacgcaccaccatgtctggataactgttgtatttttagtagagatggggtttcgacatgttggccaggctggtgtggaactcctgatctcaggtgaggtcccagctacttgagaggctgaggcaggaggatcacttgagtccaggagttcgaggttgtagtgagctatgatggcaccactgcactccaatgggaccctgtctcttaagaagaagaagaatattataaagaactttaggccgggcctggtggctcacgcctgtaatcccagcactttgggaggccgagacgggtggatcacgaggtcaggagatgagaccatcctggctaacatggtgaaaccccgtctctactaaaaatacaaaaaaattagccaggcatggtggcgggtgcctgtagtcccagctactcaggaggctgaggcaagagaatcgcttgaacctgggaggcggagcttgcagtgagccgagatcacgccactgcactccagcctgggcgacagagcgagactctgtctcaaaaaaaaaaaaaaaagaactttaagccaataattattctacaacataaaagaaattgacaaaacatagggagatcctgtctctacaaaaaataaaccataaatgcttctcactgattttcagattatagagccaactgtgtacatctgagagtataaaagcagaaatgtagctgacagacaaaaggtgggatgtggaagtgagaccaagttacttttttttcccttcaaaacctcctcctcaagtttctggatatatgtatttttaaattgtattaagaacacttgagaggggtcttatttgtgttttaactcactaagatccagaagacactacaaacaacccatttgattaaaatgggcacaaaaaactattacggatacagcacggcaaacagaaggatgttttatcttcgagatgccaggggtggaagttctgtgtagtgaggctgggatagcctgatgctcagtgtgggcagaacacagatttttttggaccgtcttggagggagaagtgttgatgtccctttggctgacactgtcaggcagaaggaaactagatctaaaggaggacacacacaggaaatggcagcataaagcacttaagtaactagagggttaagtgatrccaggtgtgggtgtcacctagcgaacacagttcttttgaatggtacaaaaaatcagtaattgaaagtgagagggccagataagagaaggggaaatatagacttatccaggaacaaaggtaagcatcagatttagcttggggatggacggtcatccattttctggaagttactgtctgctggctgttgttctgatattgatctgtagttggttcagggcaggtgatgtcttcatgctgtgtgggaaagtgagtgccaacagtctgtgctgcatagactcggcctgtgttgacatttgtttaccaactgccctttttttaacaggcgtggtatctgtctgttttgagggggacagtgatggttacatcaacttagtggcctatccttatgtggaaagtgagactgtggaacaggatgacacaacagaacgggagcaacctcggcgcaaacactcccgccggagcctgcaccggtcaggcagtggcagtgaccacaaggaggagaaagccagcctgtcccttgagacctctgagaggtaagaggtacatgtttcgtcctgctggtacaagcactcaagacgtctccatagtcctgacacatcatggggaagcagggctcacagtcaaggttggataagatgactggtgttcttgggatacccacacaggtgtagcctcttctctgtgtcacatcaccccagtggtgcctctttctgggtatagctgtagctggttgagagaggaagtgaagctctctcagccgtttggaagcagggacaccctgtgctggtgacaaaaggttctctggcttttcattatgtcttgccacccacaggacagaaggttgaaatacattagttcgtagcgaggctccaaatgctttctgacctgcaggatgtccaagcccaagggctatgagtccaaccaggagttccctaatggtttttgtgtcagacctctgagaatcatatcagtcattaacgctttccctgcaactaaaatttagtttccgttgtgttggaaattgatttttcttgtaagttcaaattatgtttttttgtttgttttgagatggagtcttgctgttaggctggaatgcagtggtgccatcttgcgtcactgcaacctctccctcctgggttcaagcaattctcctgcctctgcctcccaagtagctgggattacaggcgtgcaccaccacacccagctaatttttgtatttttagtggagatgttgtgtcaccatgttggctaggctggtctcgaactcctgacctcaggcgattcgcctgccttggcttcccaaagtgctgggattataggcatgagccactgtaccagcctcaaattatgtgtcttgataatttcatgcaagaattaatatgaactcccactaggatgggtataatcaaaaggacagacaataaaagtgttgacaagatgtgaagaaatggaaccctcctacactgctggtaggaaggtaaagtggtgcagccacttgggaaacaatttagcagttcttcaaaaagttaaaccaggctgagtgctgtggctcacgcttgtaatcctaatgcttcaggaggctgaggtgggaggatcctttgaggccaggagtttcagaccagcttgggcaacatagtgagaccccatctctaaaaaaaaaaaaaaaaaaaaaaggccaggcttggtggctcatgcctgtaatcccagcactttgggaggccaaggcaggcagatcacgaggtcaggagatcgagaccatcctggctaacacggtgaaaccctgtctctactaaaaatacaaaaaaattagccgggcatggtggtgggcacctgtagtcccagctactcgggaggctaaggcaggagaatggcgtgaacccaggaggcggagcttgtagtgagccgagatcatgccactgcacttcagcctgggcaacagagcaagactccatctcaaaaaaaaaaaaaaaaaattaaatccaaaagttaaaccagtaattccactcctaggtatatacccaaaagaattgaatacatatattcccacaaaatttgtacaaaaatgttcttaaaattatttctattagggttgtttccagtttctggctaacccaagtgtccatcaactggtgaatggataaacaaaatatggtatatccatgtaatggaatgttagccctaaaaaggaatggagtgctggtacatgctacaacatggatgaatcatgaaaacattatgttaaatgaaagaaaccagacacaaaagaccacatatgtacaatgccatttatgtaaagtgttcacatcaggcaaatctatagagagaaaaggtaggttagtggttgctttctgttagtagttaggagctggaagtagtgggaaatagggagtgactgctaatgatgatggttttgattttggggtcatgaaatgttctgaaaattaggtagtggtgatgttttacaatcttgtgaattcactaaaaaaccacagaattgtaaaaaataaaaaaataataatagaattatgagccaggcatggtgtctcacgcctgtaatcccagcactttgggaggccgaggcgggtggatcacctgaggtcaggagttcgagaccagcctgaccaacatggtgaaactccatctctagtaaatacaaaaaattagccaggtgtggtggtgcgggcctgtaatcccagctacttgggaggctgaggcaggagaatcacttgaacccaggaggtggaggttgcagtgagctgagattacaccattgcactccagcctgggcaacaagagtgaaaactctgtctcaagaaaaaaaggtttcagtaagatgcttttgtgacttgacttagaagctgaaattgggaatttccttagatgagacagtacatagttcatctgtgatatcagatcagttcaccaatacatgctacatacytgtgcccctgaagctttgtaaaggcctaggacattccagttctcctcactcagtttggtgaacaaggacatgcccatgtcaagtacagtaccccatgagacactggctgagtggggttatgtgtcatttcccatgtcctcagtcagcagatcctctttggccagtctgcatctttcatgcaaggagagagcttcatacccacttcttggtaagcagggtcttcaaatgtcaaacgttctttggacagatggcttccagtccacagaagcacttcttctagtgcttccccttcactccccaagaggctgcttcttgactaatgactgtgggacctaacttggtcgttcaggtgacaaagaatgttccccaagtctgtagctgacaattgatggttctctctgaacagcgctttagggtgggcttttccccccactctttttagagacaaggtcttgctctgtcacccaggctagagtgcagtggcaccatcagtgactcactgcagccttgaatactgggctcaagccwtcctatcccctctcacctcagcctcccaagtagctgggactacaggtgcacaccactgcaytcagctaatttttaaattttttgtagagatagggtctcactttgttgcccggggtggtctgaaactcctggcttcaagcagtcctcccaccttggcctcccaaagcgtaaggattataggcatgagccactgcgcccagtctagagtgggctttttttattgtcctccaaaggtacagaggttgcttcatgagtcatctggtgaaaaggtatagaataacatcacctagaataacatcactgtccgcctgtgtccaggttcaaggtcctgcyctgaaggtgacagctctacctgtactgaccaaacctctgtctgacctgttagcagagagaccgtcattccaggggtggggcttgtttcttcacagagccagggctgcaacacaaaaggtgtgataccaagtaccgtgggggcttcatccagacgcagagaacttctttgggtttacatggcaaataagtcaacctttctgtttcctaaagggtttcacaaaaaaaggcatctttgaatggcctcagcagtgctctcacagaagaaagtaagggttttatcattccgagaggcactggtgggctcctctactttcagttaggtggaaatggggtctctgccactacctcttcaccagtgttgcacagctgacccttggagagggtcagcatttccagcacacaccagccctggtgttagcttgaatctgtgcracttatgccacacagttagaggagaggcctgcagttctggagaggagagtggcatttgaagttgctgggcgacagagcgagactctgtctcaaaaaaaaaaaaaaaaaaaaaaaagaaattacggtaatgttccacctctgctctgagctgcaggcttgctctgtaatttgcagggcacatggcttcaccagtagtttggttttcttggcctttcagtatgatagacagtattgttggttacttcaagcaaagatttttatgttggggcataatgaaattgttggcaaagttccagtattttcagttgaagttgctttctcacaaaaactcctttgtggttttatttattttattttattatttatttatttttaagacatggtctatctgtttcccaggctggagtgtagtggcatgatcatggctcagtgcatcctcagccccctgggctcaggtgatcctcccaccttagcctcccaagtagctagctggctggaactacaggcacatgccaccatgcccagctaatttttaaattttttgtacagatggagttttgacatgttgcccaggctggtcttgaacacctgggctcaagtgatcctcctaccttggcctcccaaagtgttgggattatagttgtgacccacagtgcctggccttgacttattttagaaataaaatttccttccttggctgggcgtggtttggtagcattaagtacattcacattgttgtgcaactgactccccattcctccttcccccagcccatggcaaccacttttctagtttctgtcttaatggatttgcagttacctcacatgagtagaatcatgcaatatttatccttttgtgtctggcttatttcacttagcaaaatgttttcaagttcatatatgttgtagcatgtataggaatttcattcctttttattgctgaataatattccattgtatgtatatcccacattctgcttatccattcatctgttgatggatgcttgtttcttccttttgtttattgtgagtagtgctgctgtgaatgttgacgtaaagtgtctgtttggatccttgtcatttcttttgggtgtatacctaggaatggaattgctgagttatatataaatctatgtttaactttttgagaaaccaccaaactgtttggtggctgcatcattttacattcccaccagcagtgtacgagagttctaatttcttcacatactggacacttgctccactttcttctttgattgtagccatcctaatggatgtgaagtggtattttcatcacataatttgacaaaaatgttatttttcagatagttttaagagacataagatagttttaagagacacaggaagaacactactcataacatttactcatttttattggctcatgggaccttaatgcaacccattagcagggtctgtgggtctgtcattgtggacagatctgtgccctgtgcagcgggaccccagaggatgacttgcctgagtttcttagtgatgtgtatgttcttccttcttagctcacaggaggcaaagagtccgaaggtggagctgcacagccactcagaggtccctttccagatgctagatggcaacagtggcttgagttctgagaagatcagccacaacccctggagcctgcgttgtcacaagcagcagctgagccgcatgcgctccgagtccaaggaccgaaagctctacagtatcctcgttgcccctccttcaggagtgtctactgggtccataggtcgtgtgttggggcaccattctgcctatggctgaggtctttgtctagggtccctcttcggtttaatctccctttttcatggactcctcttccttcgtttactttcatcaacatgtttttttcctgccttttggatttggtaaggccgaagcttaaaacttggcagtctagaacagtgttgtctgatagaactgtctgtaattctgtgtgcttttcagtatggtagccactggccacactgagtggctaaaatgtggctactgtgactaaggcagttaatttaaattttattttattaattaaaatttaaatcatcacatgtggctagtgtggctagtggtactatattgatcatgtccacaatcacagatctgcgtatgtgcccatatgcgcttgtgtgcatgtgtgtagttttcccctcccaagggattaatagtttaaaggtgatatatttgactttggtgagatttttatctgatgataaacaccataaaatagatttaaaatgttaaagatagctgggcgtggtgggtcacacctgtaatcccagcactttgggaggctgaggcaggaggatcacttgagaccaggtgtttgaaaccagcctgagcaacatagtgagacttcatctctacaaaaaataaaaaaattagttggatgtggtggtgtgtgcttgtagtagtcccagctctgaggtgggaggattgcttgagcccaggaagtcgagactgcagtgggccatgattgcaccactacattctagcttctagcctgggcaacacagcaagaccctgtctcatctccagaaaagataaaaaagtattatggcataggaattccttttttttttttttttttgagacagagtctcactctgttacccaggccaaagtgcagcggtgcgatctcggctcactgcaacctccgcctcccgggttcaagagattttcatgccttagccaccccagtagctgggattacaggcgtgcgccaccacgcccagcctagaatgggaattcttacaattgttagtgttttgaagtagtagacaaataacaactggattattctaagaaactgagggaaagtgtgctgaaccttttgtacatagttaattttcacagcaatcttttgaggaaggaactctcatcattcccatgttatagatgaggaagtggaagcacagggggattaagtgttgtgcctagaggtagtgagtggtcaaggcaggattccagagcccatgcttccagggtgttgagatatttctgcagcctcctccatattttaccatcacatgtttataggtaatagcaggcaacagaattgattcaggccaaatttaaaagttactttcaaaagaatgaaatgttcatcatcacagtgatgctgagtgtctatctgctaagatgcgattgctctgtagcacccagagatggatttgagggctgggctgtgaaacccagtgactttggcagacatatgataagtctgtacctttacacaaaagttcaaagataagattgttgcaaataggatatattggaatgaagacatgtatgtaaatgccagggagttaggaccatagatcgttttgagcagaaggttatagaactattaagggataaatttatattttatatataaatatatttatatatataaatttgaaaccagtgaacgagatctctctctctcattcactggtttcaaattgagtgacaaatggcaagacagaaatataaatccaggctcattcctgtaatcccagcactttgggaggccgaggccggcagatcacctgaggttgggagtttgagaccagcctgaccaacatggagaaaccccgtctgtacacaaaattagccaggtgtagtggtgcatgcctgtaatcctagctgctcgggaggctgagacaggagaatcatttgaactcaagaggcggaggttgcgatgagccaagattgcgccattgcactccagcctaggcaacaagagtgaaactccatctcaaaaaaaaaaatacaaaaaattagtcgggcatggtggcatgcgcctatagttccagctacttgggaggctaaggcaggaggatcacttgaacctgggaggcagaggttgcagtgagctgaaattgtgctactgcactccagcctgggcaaaggagcaagactgcatcctaaaaaaaaagaaaagaaatgtaaatccagctttttctaaagattcctatttgggaatgttagaatctggtttccttgtttttgtagtagtgctaccaagatgtcttccttatttcttaggcctgggcaaggtgctggcttgagtagggccttggttcactgatggtgagggatgtatccaaatctttagtttgcatattgcctgcaagataggtctaaagataacataggctgggtgtggtggcccacatctgttatctcagcacttttggaggccaaggtgggaagatcacttgaggctaggagttcaagaccagcctggacaacatagtgagaccctgtctctaaaaaaaacattaaaaattaggtaggcggctgggcgcggtggctcatgcctgtaatcctagcactttgggaggccgaggtgggcagatcacctggagtcaagagttccagaccagtctggccaacatggtaaaaccctgctctactcaaaatacaaaaaattagctgggggtggtggcagacacctgtagtctcagctgcttgggaggctgaggcaggagaatggcttgaacccaggaggcagaggttgcaatgagctgagattgcaccactgcactacagtctgggtgacagagcaagactctgtctcaaaaaaaataataattaaaagaaaaattaggcatgcctgtagtcctagctgttccagaggctgagggtgggaggatcttttgagcccaggtggtcagtgctgcagcgagctctggatccagccactgcactccagcctgggcaacagagtgagactctgtctcaaaaaaaataataaaaaataaaaataaataataataataaggctgggcacagtaactctcgcctgtaatcccagcactttgggaggccaaggcaggcagatcacttgaggtcgggggagttcaagaccaacctgaccaacatggagaaaccccgtctctactaaaaatacaaaattagccaggcatggtggcacatgcctgtaatcccagctaccgggaggctgaggcaggagaatcacttgataccaggaggcggaggttgcggtgagctgagatagtgccattgcactccagcctgggcaacgagcgaaactccgtctcaaaaaaaaaataaaataaaaaataacaaaaataaatcaacataaaaataccctagagcttaggttaaaaaaccaaaaaacaacaacaaaaaagtttgtgatatatacatacaatggaaaattatttagccagaaaaaggaatgaaattttgatacatgcttacaacataaatgaatcttgaatacattctgctaagtgaaataagccagacatttaaaatgacaaatactgtataattccacttatgagatacccaggaaaggtaaatgtatagagacagaaagtagactagaggttcccaggggctgggaggagggaaaatgaggagtcactgttcagtgctatttaatgggtacaagcaggaaaatggcttgaaccccctgagacagaggttgcagtgagccgagatggcgccattgcattccagcctgggtgacagaacgagactccatctaaaaaaaaaaaaaaaattaggcatgcctgtagtcctagttgttccagaggctgagggtgagaggatctcttttcattttgggaagatgaaaaagttctagctgggcgtggtggctcacacctgtaatcccagcactttgggaggctgaggcaggcgaatcacaaggtcaggagttcgagaccagcctggccaacatggtgaatccctgtctctactaaaaatacaaaaaatgagccgggtgtagtggcgggcacctgtaatctcagctactcaggcagccgaggcaggagaatagcttgaacctgggatgcagaggttgcagttagccgagatcactccagggcactccagcctgggtaacagagcgagactccgtttcaaaaaaaaagaaaagttctagagatagatggttgtgagtagagatagatggttgtgatggttatacaacaaagtaaatgtacttcatgccactgaattgtacacttaaaaatggctgaagtaaattttatgtatattttaccacagtttttattggttaagtaataagccagtggtgtgaaacccatatttgagagtttgagacaagtacatactgcattaggtaaaagcccccttttatagaaaaactgggttgtgctttcctggctggggctgatggtgagtgtggttgtcattctccttgaccgtggcccagagttcctcctgcttgagaacgtggtgcaccacttcaagtacccctgygtgttggacctgaagatgggcacgcggcagcatggcgatgacgcgtcagctgagaaggcagcccggcagatgcggaaatgcgagcagagcacatcagccacgctgggygtcagggtctgcggcatgcaggtgagttacctctgctcagagcctaggtgctgccacttgcatgatttgggttstgctcatacctgcctgccatctatgccaagtgtgtcctcctgagcccctctgtccttacctgttgactttgatatgggcctcaggtgcaggaccactgtgagagtctgctgcctcgacattgggacaaataagactcttgcctgtcaacaagatgttccgatgttggaggagggctccaaagctgggggcagggaacccataggcctggtattgctttctcttggttctgcaatgggaaaacccagggtgaatgtggcctgcctggttccacttagataggtgagcagaaaagctcaggttggtcaaagtcccttccagacagtgtttgcccagggcactgtgagctcttcagacttccctggcactcaccctstctgcctcctggggtttcaggtgtaccagctggacacagggcattacctctgcaggaacaagtactatggccgtgggctctccattgaaggcttccgcaatgccctctatcaatatctgcacaatggcctggacctgcgacgtgacctgtttgagcctatcctgagcaaactgcggggcctgaaagctgtgctggagcggcaggcctcttaccgcttctactccagttccctgcttgtcatctatgatggcaaggagtgccgggctgagtcctgcctggaccgccggtctgagatgcgtctcaagcacctggacatggtgctccctgaggtggcgtcatcctgtggccccagcaccagccccagcaacaccagccccgaggcgggtccctcctctcagcccaaggtggatgtccgcatgattgactttgcacacagcacattcaagggcttccgggatgaccccaccgtgcatgatgggccagacagaggctacgtgtttggcctggagaacctcatcagcatcatggaacagatgcgggacgagaaccagtaggccctgttctgggcccccagaaccccttcctctccactgcaggcagggaccattgttctgaacttgccgtgaggacacacagacttgcttttaaagggttatatttctctttggtgtaaactaaaagaaatgtttttagctgtagcctggaatccatatatataaagtgaaggagggcagaccacacgccctctcagccaggctcctcagctttgtggctctgactggtgtgtccaggctgccttaggaaggaagaggtgcccctggtgggcttggcagcagggacagggtgcccttggacattggtttctcttgtctagatctttgagatctgtggctgcagggccctgctgattgtaaggtaaagccctgggctggtgcagggcccctccacgcccactcttcccttgttccccagaagtagagggctctgggtgcccatttcttgggggctttccagtcttatgctgtgggtgtcagctagctctttaataggtgccctcagggcaccacagggctgactgcacaaagctggacccatccttcggtctgaccttagcatggggctagattaatgaagctgggctgaggccaacttatggcagagggcggcgcctgggttccccaggcacctgttggcacgtgacaggttggcacctgtcctattcctgaaacagcctctctcaccaagttcccttgcctaagaaggccactccctcccaccccactgaagtgggggatagtcggtgtcctagcaggcctcagggcctctggtggctctggcccagacagtatttgcagttcttgtgctatgggtgggagtcttcttcctcaagtttcggcagctgtgctgctgctggatgggctgctcytccsasggctcaagggctgtggtcygctcagggtctcatttccccaggccaagttcaaggcagcagccctttgtgaggcgctcttggccctgggcctggagggagaactttaagcttttttgctcacagggacgtggtatgggccctgggtgcaggtgcccacattctgctaatgagagctttgtctgatcagtcctgggtccatcagtttgtccatgtgtccggctgccagcccgtcccttgggatccttcccctggggtgtagccttgttcattagtatatactcattccttcatgctttcctcagcagaacacttccacttctgaggtgagcttttgccccrtgcccttcctccacaggtgttgcctttttataaagacctgatagcagaataaattggtgtttccctgttgacccagcaccatttctgtgggcctagaatatggccctcaacccttagagtggggcagtgagggcttgaggagtgacccttcctttctcatggttttagtcattttggctgccagcccttaatggcacagatctgctgctyctaacagatggccaggaggtgacaccgatttcagccattgccaaggttagcaccctctcctttgagcctagggccacactgttcattgtcactttaggcaagtgcctgtttggctttaaaggtaagcctgccagctgtgagaagccttggtaactgatggactcatttcctggtccttaaagatgcagcctcttaagggctccttgatggatgccatctctcctagcccccagccctggtgccactggtgggcaggttcccattctttggggctgggagggacagcttgcctgtttctggtcacaaattacagtcttctctcctgtaccattctgtggcttcagccatgggggcagtagcccttcattagtgtagatagtcattccctggtagggtggagggtaagacatagggtctggaactgtttgggaccttttggggatgtcctgtgcctcccagattcctcgattctgggaggagaggctgccgcattctgctgctyctcacagcgagcaaagctgcacccacttacattcagtattttcctggcactacaaagagtgggaaggcctgggatttgctgctgctcccttagagcagggcccctyttttcagcactttggacacctggagacccagccctgttatttaatggtagtgggcaagtgtgtgtgcatactgtctgccactgctttctccctgccccatgccagagagccctgtccctgccaggcccagccttcttagccccaacttgggaacaaagtgcaacatgggatcatgggttggggtgctcaggtgagccctctctatagtgmttccctgggccaagctgacaccagcccctgagggtggggtgggacgggtggtgcttaaaagaggaaggggaccagtgtagcaacttgccagggaccccacccctccctctctgggcctgtgcagtgagcatggggattcccatcaaggggcctggcacctgtgctagttacgtagccgctgctcacgcgctcactcctgaccacatgcacgttccctagatgcagactgctttgaactttaaagctgtacaatttggttatgtttgtgctgacttaaaatatattttaatgaggaaaaaataatggagaaccctgggaaggacctggttcttttgcttctcggggaactgtaagccctcgcgttctgggaatcgctctctgctgctctttcctggaagctaagcctgtctccaccgcccgaggcctgcgccggtggctcccgccgcagttgcgtttgctttggaccttgcgtgcgggggagggggtgctcggtccgagcccgctcctttctgtacacctagcgctgcccgccccgcttgtgtctgaggtcgtgtatgtcaaaaataaagccgctagaaacggaggcgagtctgtctttgtgaaaatcccgtggcccgggagccttccctggtcaccctcggggcgaggccggggccgtggggcggggccggcggctgctggaccgcggcgaagcagggaacaaggcctcgcccttggcgccagttccgcctttggatcygccaatggccagctgacccgcgggtcccggcccgggtctccatggcagcccggcgtactcgggcgctcattggctacgtctgtcgcagcgctgcgctccaacgttccgacgccggcggccgtgccacgtacgcggcagccgattggcccgcggtggtcgcgtcactgcccgcgccgggtccggcctgagttcggggccagcagccgtctacccggtgtcgcgttctgtgttgtggcggccctggatccggcgtcagggcgaccgggcggacgaggtggagccagagtctgtcaggcgggttggtgaagggcgcggggccgggcacggcgttgggagtgcgcggcagggaccggccaggcgggctgcaggcacctcagagcccgggacaccccctcaacgtccgcaggcgcgatgaaggcactgatcttagtggggggctatgggacgcggctacggccgctgacgctgagcaccccgaagccactggtggacttctgcaataagcccatcttgctgcaccaagtggaggcgctagccgcggtaagaccctgggtcgggatcagagtcgcgttcggatctggcgggactagggatggccagcgactaggggtcaggggctcccgtaccttctgactgagcccgcccgtcggcctgcgttctgacaggcaggcgtggaccacgtgatcctggccgtgagctacatgtcgcaggtgctggagaaggaaatgaaggcacaggagcagagggtgaggcacagactcttggcccttattctcggtccccgcccaacttcccatcctggtagaacctgactgggggggcctcttccttccagctgggaatccgaatctccatgtcccatgaagaggagcctttggggacaggtcagtagaggcagaaaggtcccttgggggagggtttaaggccaggaaaagggtaagacccagcctggagtgggcctgctgagcctgaatccagggactcagacctccagcaaggtggtgacctgtccccttcccccagctgggcccctggcgctggcccgtgacctactctctgagactgcagaccctttcttcgtcctcaacagtgacgtgatctgcgatttccccttccaagccatggtgcagttccaccggsaccatggccaggagggctccatcctggtaaggcgccaggtcttctctctcttgacactttcaccctccatgcccagcctcccatgccccctagccttcatctgccttcggatgttatggatacagagctgtgcagtatgtatctttaagcacttggggcagagtctcttgagatctggaacggcatgtgtatcaaggcttaggaacactggactaggtccgaggtccccttccttgcattcaggtgaccaaggtggaggaaccctccaagtacggtgtggtggtgtgtgaggctgacacaggccgcattcaccggttcgtggagaagccacaggtgtttgtgtccaataagatcaacgcaggcatgtacatcctgagccctgcagtgctgcrgcgcatccaggtgtgtaggagacagctgttggtgggctggggtggggcaggccatcaccgccatgaccctgctcacaagctgcccactcccacagctgcagcctacgtccattgagaaggaggtcttccccattatggccaaggaggggcagctatatgccatggagttacagggtgaggcagggaggccacagggtgggggtggtctgtggctgggctgaggcccctgatgcatccctccctacaggcttctggatggacattgggcagcccaaggacttcctcactggcatgtgcctcttcctgcagtcactgaggcagaagcagcctgagcggctgtgctcaggccctggcattgtgggcaacgtgctggtggtgaggcccttgcccagcccatcattaaccccctcagtcttgggagacaagtggcccacttgtatttttcccaccgctctcaggacccaagtgcccgcatcggccagaactgcagcattggccccaatgtgagcctgggacctggcgtggtggtcgaagatggtgtgtgtatccggcggtgcacggtgctgcgggatgcccggatccgttcccattcctggcttgagtcctgcattgtgggctggcgctgccgcgtgggtcagtgggtaagcctgtgggctgggctgggtggggagaggggcggggagtgtgcctgcctccctgacaaggcctatcctctcctggaggtacgcatggagaacgtgacagtgctgggtgaggacgtcatagttaatgatgagctctacctcaacggagccagcgtgctgccccacaagtctattggcgagtcagtgccagagcctcgtatcatcatgtgaggggatgcagtggggctggccgagccccggttttcccatcagcaaggggagtgctggcctgacacatcagaagaccctggacttgtcattatttgtctggggggcactgggtgaagctgaagctgttggacacctgccttctcatgtggacatcatctggcaggatccctgctgggcacaccccacaaaccccactccctcaagaagggccagggccagggctgtatggaataataatttaatgctcactgtggccctgactgaaagtcaagctcaggcacaattagggccatggctgggctcccaccaatgaggatacaggcaggcaaggaggttggatgtggtggtgtgggatacaggagaagggcaaagggagctcataaatagggcccagcctggctctgggttcaaaggtggaggytccaggatggcacaggctgtgagggctaggcagctgaggaggtagtactcgtattggctcccttctcccagtcctctacagacacgatggtggttttgcagaagaagcagtccttgttgttcatcaggtgctggttgatacaggctctacaacaggggaggggatgaggactgccctgcatgtacctactgctctccccaccaccaagctgtggggcccacttacttgcaggacttgtggccacagggctggaacacagcagagatrgggtgggcatagcagatggggcagaggtcctcctcactggtgggctgcagggaggagagtgaagggtgggctggagttggatgcctggctatgtggatgtccgttgtgcctgtgtaggagtgcacacatattcaagtggcatggacctgtgcaccgtgttcccactcaccagggaggcagctgctgcctgggcagatgcagaggtcaggtgcgccagcatctgttccacttgggccagctcatcggcactgatataatccgcatctggggagtggtaggtagtgtcaagtcagaggtagctgaggatgtgatgcctcttgaatattcccagcctaggactttgctgttcttaaggctcctgacccgacccagccccagatttccctgacctgccccaccagcccactcacagctctgcagggagaagcgcttccggtcaggggctggcagagcagtgccaggtgctgggggctctggctgtcccaggagatagcatattgagcgtagctggaagcagggatctgccaggagcactgatgtggcttgctctctcctaggtaggggagggtgcaagggcagtcagaaggcttggggcctggctaaaagtctctcttgggattgccaatgaggagtgccatggctcgtacatgatcaccccccctgcatcctttccgtctccctgcttcccaaaccccaagtcctgtattctagtaaggtgccacacagcctgttttttttttttttttcttgagacgagtctcgctctgttgcccaggctggagtgcgatggcacgatctcggctcactgcaacctccacctcccgggttcaagtgattctcctgctttagcctcccgagtagctggaattgcagacgcccaccaccacgcccggctaattgttgtatttttagtagagacagggtttcaccaggttggccaggctggtctcgaattcctgacctcaggtgatccacctgccttggcttcccaaagtgctgggattacaggcgtgagccaccgcgcccggcctggggtaccactttaagaaggctcaggcgaaccaccttaagatagtgagagtctgcctgccccataatattatcagtccttcaaagtcacttcaaataaacactaacagcagcttggagacattcttccagactcccccttttactccccgaggaaaaacgagcggcggagagctgccagccaaaggctgacggggactttggggttggccttgctccccatctggcggtcatgcggggccattgggcacaaagggatgtagccgccccgcctcctcaaacgggaaccaataggagcccgggccccgcccctggggggagtatttaggagccgatcaggaactcgcttggagagggctagcgaagccgaagggagcgcggctaagagtgccgcaccgcctcacaacctgggaaccggagagtaggggccgtcggctggcaagaacccgccgtgcctcctcggcaagggccatccggtgccacccatgtcgcactagagcagaagagggtgagtcctggaactgcaacctgcacagagctgctctgtactgtccctggtggtcgccgccatgacctggttggtgctgctggggacactgctctgcatgctgcgcgttgggttaggcaccccggactccgagggtttcccgccccgtgcgctccacaactgcccctacaaatgtatctgcgctgccgacctgctaagctgcactggcctagggctgcaggacgtgccagccgagttacctgccgctactgcggacctcgacctgagccacaacgcgctccagcgcctgcgccccggctggttggcgcccctcttccagctgcgcgccctgcacctagaccacaacgaactagatgcgctgggtcgcggcgtcttcgtcaacgccagcggcctgaggctgctcgatctatcatctaacacgttgcgggcgcttggccgccacgacctcracgggctgggggcgctggagaagctgcttctgttcaataaccgcttggtgcacttggacgagcatgccttccacggcctgcgcgcgctcagccatctctacctgggctgcaacgaactcgcctcgttctccttcgaccacctgcacggtctgagcgccacccacctgcttactctggacctctcctccaaccggctgggacacatctccgtacctgagctggccgcgctgccggccttcctcaagaacggcctctacttgcacaacaaccctttgccttgcgactgccgcctctaccayctgctacagcgctggcaccagcggggcctgagcgccgtgcgcgactttgcgcgcgagtacgtatgcttggccttcaaggtacccgcgtcccgcgtgcgcttcttccagcacagccgcgtctttgagaactgctcgtcggccccagctcttggcctagagcggccggaagagcacctgtacgcgctggtgggtcggtccctgaggctttactgcaacaccagcgtcccggccatgcgcattgcctgrgtttcgccgcagcaggagcttctcagggcgccaggatcccgcgatggcagcatcgcggtgctggccgacggcagcttggccataggcaacgtacaggagcagcatgcgggactcttcgtgtgcctggccactgggccccgcctgcaccacaaccagacgcacgagtacaacgtgagcgtgcactttccgcgcccagagcccgaggctttcaacacaggcttcaccacactgctgggctgtgccgtgggccttgtgctcgtgctgctctacctgttcgccccaccctgccgctgctgr

SEQ ID NO: 94607 - DNA, 25697 bp, Homo sapiens
taggccaaggcctgaaccttttcgggagcagtgattgaggccaacaccctctcctaggggtgtgctagggtttgcagcgttaatggggggctgtagacggcctggccaggtctgaggtagggggaggagggagtgctggagtgtcctgtgttgggaatggggactgtgaagggcagctggggagggatgggttagcgcgccttggagtgtggtgcactcgagccctgtcctgcaacaaggggtgaggggacagggacgttgggacagatgggggtcctcagttgacctctccctgccctcctcttgttctgtgcagatggcggctgcagaggctgtgcatcacatacacctgcagaacttctcacgctctctgcttgagaccctcaatgggcagaggcttgggggacacttctgtgacgtgactgtgcgcattcgtgaagcttcgctgcgtgcccaccgctgcgtgctggcggccggctcacccttcttccaagacaagctgctgctcggccactctgagatccgtgtgcctccggtggtgcccgcgcagacagtgcgacagctggtagagttcctgtacagcggttcgctcgttgtggcgcagggtgaagccctgcaggtgctcacggccgcgtcagtgcttcgcatacagacagttatcgaygaatgcacgcagattatcgcccgcgctcgagccccgggcacctctgcgcccacgcccctgcccacccctgtgcccccgccactcgcacctgcgcagctgcgtcaccgyctgcgccacctgctggctgcacgtcccccggggcaccccggtgctgcacacagccgtaagcagcgccagcccgcgcgtttgcagctgccagcgcccccaacacctgccaaggctgaggggcctgatgctgacccctcactgtcygcggcccctgatgaccgaggtgacgaggatgacgaggaaagtgacgatgagaccgatggcgaggatggcgaaggtggcggsccaggcgagggccaggcacctccttccttcccagactgtgctgctggcttcctcactgctgctgctgacagcgcgtgcgaggagccccctgcacccactggcctcgctgactacagtggtgccgggagagattttcttcggggagctgggtcagctgaggacgtatttccagacagctatgtatccacttggcacgasgaggatggcgctgtccccgaaggctgtcccactgagacccctgtccagcccgactgcatactgtctggatcccgcccgcctggtgtgaagaccccagggccgcccgttgcactcttcccctttcacttgggtgcccctgggccacccgcaccacccccttcagcaccatcggggccagcccctgcgcccccacccgccttctaccccacactccagcccgaggcagcccccagtactcagctgggggaggtcccggctccctctgctgctcccaccacggccccctcaggcacccctgctcgcaccccaggtgctgagccacctacgtatgagtgcagccactgtcgcaagacgttcagctcccggaaaaactacaccaagcacatgttcatccactcgggtgagccagggcgggggaggagagggagcaatctctcatcggagagttaaacctgagggggaattgagcactagttacagggcactggcactgttctgttacttttggttagcagggggcctagaaattgagccttcccccaagtgcaaggtatgtgggggaggggaaagccccactctgtggagcagcaggcactggcttctgtggagggggatcctgaggctgggtagggaagcaggagcctgtcctggcctttggaagggtggtggtggaaacttgagcagcctgggatgcacatgatgggtatggagccttggcaggaggtcctggcaggttgggaaactatgctccagggagcctcctgtgtctctctggtttccagctgtcccgttataggctggcagcaagggaggatgggtttacaggcccaggggtagaaagccctcagaggtggtgggatgaaggccccaggaactcctgagactggggcatgagtaggaaaacataggtagtgtggggactccacagctgcagaggaccccgaaaagctgtggggaggttccctcggaccttggccgtgtcagggaggcggctctgcagtgctgcaggagaggtaaagagtgggagggtggtactggggaatgtggtgaggatgctccctgggggctctgagatggaggacaaaggaatggaaagcagaagcctgctgagcattgtcagaaaaagcaaaaatttggctggaaggccacagtgatagtgagggggtttctgcaggggctggaacttgggatttgactgtgagtggtggggaagccatggtgttctaagctggggagtgactgagatgtcagtttaaaatcacctctggctgccctgggagaagccaggggcctgggaataagggagttgggtgattagtctccagggaactgccagaggccccagggtagtgctggctgtgtgaagtgtgtgatctgagccaggtgcctgggccaggttattctggggtaccctctggcaggcactgcctttcagtccactgccactgagatagggttttttttttttttaattttttttgagaccgagtctccctctgttgcccaggctggagtgcagtggtgtgatctcggctcactgcaacctctgcctcctgggttcaagtgattcttgtgcctcagtctcccaagtagctgggattacaggcgtgcaccaccacacccggctattttttgtatttttagtagagatggggtttcaccacgttggtctcgaactcctggcctcaagcgatctgcctgccttggcctcccaaagtgctgggattacaggtgtgagccaccacgcctggctgagacaggcattttgttaacatctgatgaatctaggggtggactcagactgcctcccctcccctaacccagaatgaggagctctctctatcacaccaaggacattatagtggccagcgggcaggggttctgggcaactggggcttcctgcaggaaggtggcagatgtgcccaggtccctccttatgaaagggcactggccttgtcagactgagtttaggggactctatgggcataggcgaggggggccaggacccagtgtctccctgtgccgggtgggtaggggttgagggggagggtacctgagggtagagggagatcccagtgggcagtccagatggccaacagatgttccagacaggctgggttccttgcagacagggtgcttgctggatttaggggtgccctgtcacagtgatatcccaggataacagaaagggggtccctgccaggaagggatgggagaggggtacctcacagtgtatgaggatccctgttgggcaggaaagtcccaacgtgaagggaggtcctggagaggagggggtgtccctgctgggcaggaagatcccatagtgaggggagggttctctgataggcaagggatcccggggtggtggttcgggaggggaggggagcccctgctaggtccaggagcccaggtgggggtggggtggggtgggggcggggagctgtagagtctgacttgcgttcgcggcccgccctgtcgtccgcaggggagaagccgcaccagtgcgccgtgtgctggcgatccttctctctacgcgactacctgctcaaacacatggtcacgcacaccggcgtgcgcgccttccagtgcgccgtctgcgccaagcgcttcacgcagaagagctcgctcaacgtgcacatgcgcactcaccggcccgagcgcgcgccctgccccgcctgcggcaaggtcttctcgcaccgcgcgctgctggagcgccacctggcggcgcaccctgcgccctgatggcgctggggcctggcctcgcccacggtggatccggggcctcccgcacagtcggccacgcccgctgcgggacccgtggttcccgccactagaccacgctccctcctgagcgcaggtcctctctctcccttcaccctttctccataccagggcctaagtccgccttactcctctcctccatgtacttgaaccctccaggtggtgccgggctggggctggggctggttagaccacttctgagaactggactatttcctgcgtaaaccgggcgctcaggcgcttggacccggcccaagatttgactccggttctcaccccgccctctcctggggtggtggtgggggctggggggccgcttgcctgccccagggtcaggctgggcaaggtccctagctctctacccaagctgttactccctcatggggcgcctaaggagactcaagtggacccatcatatatgggggctgggcctcgggactctcgctctaataaaggactgtaggccatggggcctaaaccacgaagctgtgagcacctggatcagtgcgtgccttgccctcatagacaagatgtgagtgtcagggttcagcgtccctgttcttgggtggcatccatgcggcccacaggctgtcctgggcaggaacaggatggtccactttgccatctaggacctctattctgtaggggctaaggtgggctgcatatataaccagcacttggttctcttggatccctcagtcctgtggggagtaggataggcaggccacatctgaggtgggtctccgagagggaggccacgtgaaagccccatcatactcctggttgctgctgtccacgacctttaaggcccctcccatagatcttccagtcaggctctaagggtcttttggacttaagacttcccctccccgaccttgatggacatggctgagcaccttacttgtggggagcccagggggatctttggggccaggttgcactgagggtatataagcccccatatatctgcccttggtgctgggggcaaagttcagggagggctccgatggccgtgttgggggcaggaaacagtgaggggtgggatcctggggctgactgctgggcggttggggacaccacccctactggccagccagtgtcccaggcccctgcatccagcggagagagcagccactctttgcccctctcctcttcagcacaatagtggctcctagcctaggtgccctgccataaggatttggagctggtggagtggggtatggccccaggccataccccagcctgacctgccaggctcctaggccaatggcagctcctctgggttcaccttctgagactgcttcctcaaggtgagaggccagggctttcatgatccaactgtgtgcatcatgggctgacttcagtctcctgaaccccaggactccatcgtcgtcaaagccagaggtggagcagagagtcagagcaagcacatgggtggggggcagagctgggtttgaatccaggcgatgccagtgttcctgtatttactgagcacttgctgtatgcctggcaggagggtacgattcctcggatcatgggacaaggggcttagcctggctgagcccctctcctcagggtttcagtgggtgtcacaggaggacctcccaatgaggtccaccttgctgtcctgttgcttttctgtttggcctgattggagtgttcccaagggcagggatttctgtgctctgagtgtctggtacccagcagggatgggaggggaggcaagggagttagatgccagccctggagggtggatggggcaagcaggacagcaggaaggaggctagtggtgcccaaggggcagagacctgggaacccagaggccagtgatggaaagggttagcgccaggcagagaggggctggacccacacacaagaccaggcagagcaaacaaacgtagaggagaagggctgggggcaaagtcctggggagaggaccagccactgtcagcagtgccagggccaccacccctggggaggagccattgggctactcttgaggggccagaggtgagcctgaacactccacagctgctgctcctagggaggagctggtaccatgggtgtcaggcaacagttggccttgctgctgctgctgctgctcctgctctggggcctggggcagccagtgtggccagtcgctgtggccttgaccctgcgctggctcctgggggatcccacatgttgcgtgctacttgggctggccaygttagcayggccctggctcggcccctgggtgccccatgggctgagcctggcagctgcggccctggcactaaccctcctgccagcacggctgcccccaggactacgctggctgccggctgatgtgatcttcttggccaagatcctccacctgggcctgaagatcaggggatgcttgagccggcagccgcctgacacctttgtagatgccttcgagcggcgagcacgagcgcagcctggcagggcactcttggtgtggacggggcctggggccggctcagtcacctttggtgagctggatgcccgggcctgccaggcggcatgggccctgaaggctgagctgggtgaccctgcgagcctgtgtgccggggagcctactgccctccttgtgctggcttcccaggccgttccagccctgtgtatgtggctggggctggccaagctgggctgcccaacagcctggatcaacccgcatggccgggggatgcccctggcgcactctgtgctgagctctggggcccgggtgctggtggtggacccaggtgagggccttggagccagtggagaatggaagggggcaagggcagggactataggacaggggttctgctgggactggcagaggcccttggtccccacctgcctactttcacaggcaattataatcaagacttatgagcagaaagtagttctcaggtcatcagagtttaattttcccacaatttgaccaaaaatactaatgatgggattctttaccaaacaacatggatgcttttctctactagctgctcctctgcctgcatctgtgggtctcagatcccgcctcgcaacctcaaaggtgagccttgcctctgtttctcctctgacccatctctgcagacctccgggagagcctggaggagatccttcccaagctgcaggctgagaacatccgctgcttctacctcagccatacctcccctacaccaggggtgggggctctgggggctgccctggatgcagcgccctcccacccagtgcctgctgacctgcgtgctgggatcacatggagaagccctgccctcttcatctatacctcggggaccactggtgagggtgcccattagccctagcaccagcctctgaactctcaggctgacctgaccccacacttgacttgtgactcagtgttgacctctgaaaccactttaccctctgattttgacatttgttttttgtttggctgttttttttttcgaggcagagtctcgctctgtcgcctaggctggactgcagtggtgcaatctcggctcactgcaacctccacctcctgggttcaagcaattctcttgcctcagcctcctgagtagctgggattacaggcacacaccactatgcccagctaatttttgtatttttggtagagacagggtttccccaagttagccaggctggtctctaacccctgacctcaggggacctgcccaactcagcctctcaaaatgctgggattacaggcgtgagccactgctcccagacttgattttgatatttggcctgaactctgacccccaatgtaatttgagaggtcaatgccagaattcttcctgtgtccagtaaacagccactgaaacctttgatcttgacatattactttcagtccaaattcagcctgtgaacccaaccacaaatccctatacttgactgttctctgagagcctcaaaccccaatgtaggcctggctgttggagatctatccctctggtcaggcccctctctgtgctgtcatgtcaccaccctgcccttgccatgccttcatcccaaggcctcccgaagccagccatcctcacrcatgagcgggtactgcagatgagcaagatgctgtccttatctggggccacagctgatgatgtggtttacacggtcctgcctctgtaccacgtgatgggacttgtcgttgggatcctcggctgcttagatctcggtaagcccacttctgaggatccctccagtctacaggaccacgggagtaagtgtcggcgtggggctgtcaaggcaaaaagacaccataggttacccagcaccctgtgttctcacttttgagaagggacacccaccaatgactaccagggccgcatggacagaagcytggacacccacacagtccctgatggccatgctttggtcaggaggtgacaagacctgatacgagtgatggtcacaggcatccaaggaaggtgtggtgctcaggagatgatggggatgctggcccagatttgtgacatggccccaagggcagctggagtaggagtgctctcaagcactccacagggctgtctctctggactcttgattcagagtctagatggggacctctccatagcttgttctttttgttttctctcttttttttttattttaatttttatttatttattttttttcgagacagagtcttgctttgtcacccaggctggagtgcagaggcatgatcttggctcactgcaacctctgcctcctgggttcaagcaattctcctgcctcatcctcctgagtaactgggattacaggcgcccaccaccacgcccggctaatttttgtagttttagtagagacgggatttcaccatcttggccaggctggtcttgaactcctgacctcgtgatccacctgccttggcctcccaaagtgctgagattacaggtgtgagccaccgcacctggctattttctctctctctctctttttttttttgagacagagtctcgctctgtcgcccaggctggagtgcggtggcatgatctcggctcactgcaagctccgccttccaggttcaagcgattttcctgcctcagcctcctgagtagctgggattacaggcacgcaccaccacgcccagctaatttttgtatttttactagagactaggtttcaccatgttggtcaggctggtctcaaactcctgaccttgtgatctgcccacatttgcgggcatttgcctcccaaagcgctgggattacaggtgtgacccaccacgcccggcctttttgtgttttccagctattatcatggccatgtgtggttgctcatgcctataatccctgcactttgggtgccaaggcaggaggatcacttgagtccaggagttcaacaccagcgtgggcaacatagtaagaggccatctgttaaaaaaaaattttaaaaagccacgcatggtggtatcgggggaacctgcccctaatatttcaatgtaggttctttttttttttttttttgagatggagtctcgctctgtcgcccaggctggagtgcagtggtgcgatctcagctcactgcaagctctgcctcctgggttcatgccattctcctgcctcagcctccccagtagctgggactacaggcgcctgccaccacgcccggctaattttttgtatttttagtagagatggggtttcacatttagccaggatggtctcaatctcctgacctcatgatcctcccacctcggcctcccaaagtgctgggattacaggcgtgagccactgtgcccggcctcgatgtaggttctttctattttccgtaagtgctggccagctgagaaataaagagaaagagtacaaagagaggaatttgacagctgggcctccgggggtgacatcacatatcggtaggaccatgatgcccacctgagctcaaagccagcaagttttattaaggatttcagaagggaagggggtgtaagaacagagaataggtacaaagatcacatgcttcaaagggcaaaaaacggaactactgatcagggtccaacaaagatcacaaggcaaagggcaaaagcagaactgataagggtctatgttcagtggtgcacatattgtcttgataaacatcttaaacaacagaaaacagggttcaagagcagagaactggtctgacctcaaatttaccagggcggggtttttccccaccctagtaagcctgagggtactgcaggagaccagggtgcatctcagtccttatctcaactgcataggacagacattcccagagcggccatttatagacctccccccaggaatgaattcctttcccagggtcttaatgttaatattccttgctaggaaaataatttagcaatatctctcctacttgcacgtccacttataggctctctgcaagaagaaaaatatggctctttttgcccagccccgcaggcagtcagaccttagggttgtcttcccttgttccctaaaatcactctcattctgttctttttcaatgtgcgctgatttcacattgttcaaacacacattttacaatcaatttgtacagttaacacaattatcacagggtcctgaggtgacgtacatcctcagtttatgaagataacaggattaagagatgaaagtaagacaggcgtaagaaattataagagtattatttgggaagtgataaatgtccatgttatcttcacaatttatgttcctctgccgtggctccagccggtccgtctgttaggggtccctgacttcccgcaacagtggtgagcacttgtgagcgattcttctgcctcagcatcccgagtagctgttattacaggtgcccaccactatgcccggctaatttttgaatttttagtataggtggggtctcaccatgttggccaggctggtctccaacacctgacctcatgatccacccacctcagcctcccaaagtgctgggattacaggcatgagccaccgcgcccggccaaatttttcttttttttttaattatgaaaagtttagctgtgcccggtggttcacgcctgtaatcccagcactttgggaggctgaggcgggtggatcacctgaggtcaggagttcaagacaagcctggtcaacatagtgaaatctgtctctacttaaaatacaaaaattagccagtcatggtggctcacgcctgtaatcccagcactttgggaagctgaggccactggatcacctgaaatcaggagtttgagaccagcctggccaacatggtaaaaccctgtctgtactgaaaatacaaaattagctgggcgtggtgatgcgagcctgtgtttccagctactcgggaggctgaggcaggaaaatcgcttcaacctgggaggcgggggttgcaaaaagagtgaaactcccttgcaaaaaaaaaaaaaaagtgaaaatagtttgatgacatctcatgtatcttcgcccagcatcaataattgttaacatgttgccagtttaatttcgcatatacttctctgtttcttttttgtttgtttttgagacacagtctcgctctgtcacccaggctggagtgcagtggcaccatctcagatcaccacaacctctgcctcccgggttcaagcaattctctgctgaggctgagcctcctgagtagctgggattacaggcatgcgcctccacacctggctaatgtttgtattcttagtagagacggggttttgccatgttggccaggctggtctcgaactcctgacctcaggtgatccacctacctcggcctcccaaagtgctgggattacaggygtgaaccaccgcgcctggcgtctgtttgttttcaaacttttatcatggccaggtgtggttcctcatgcctataatccctgcactttggggtaccaaggcaggaggatcacttgagcccaggagttcaacaccagcctgggcaacatagtgagagtccatctgttaaaaaaaaaaaaaagccaggcatggtggtgagcacttgtgagcgattctcctgcctcascctccctagtagctgttattacaggctcccaccaccgtgcctggctaacttttgtatttttagtagagacagggtttaaccatgttggccaggctggtctcgaactcctgacctcgtgatccgcccgcctcggcctcccaaagtgctgggattacaggtgtgaactaccgtgcccggccaaatgtttttttttttttttttgagtcggggtttcactattgttgcccaggatggaatgcaatggcgcgatgtcggctcactgcaacctctgcctcctgggttcaagcgattctcctgcctcagcatcccaagtagctgggattacaggcatgtgccctcacgaccggctaatttttttttatgtttttagtagagatggggtttctccatgttggtcaggcttgtctcaaactcccgacctcaggtgatccgcccacctcagcctcgcaaagtgctgggattacaggcgtgagccactgcgcccggccaaattgtttttttaattatgaaaagtttaggctgtgcccagtggtttacgcctgtaatcccagcactttgggaggatgagtctggtggatcacctgaggtcaggagttcaagatcagcctggctaacatggcaaaatccgtctctacctaaaatacaaaaattaccggggcatggtggctcacgcctgtaatcccagcactttgggaggctgaggccggcggaacacctgaagtcaggagtttgagaccagcctggccaacatggtgaaaccctgtctctactgaaaatacaaaattagctgggtatggtggtgggcgcctgtatttccagctaccagggaggctgaggcaggagaatcgcttgaacccggggcgcaggggttgcagtgagccgagatctagccattgcattccagcctgtgcaaaaagcgagactctgtctcaaaaaaaaaaaaaaaaaaagtgaaaatagtttgatgacatctcaggtatcttcacccagcttcaataattgttaacatgctgccagtttaatttctttttttttttttctttgagatggagtctcgctctgtcgcccaggctggagtgcagtggcgcaatctctgctcacggcaagctccgcctcctgggttcatgccattctcctgcctaagtctccggagtagctgggactacaagtgaccgccaccacgcctggctatttttttttgtatttttagtagagacagggtttcacggtgttcaccaggatggtctcaatctcctgacctcgtgatccgcccgcctcggcctcccaaagtgctgggattacaggcatgagccaccgcgcccagggccagtttaatttcacatgtacttccctgtttcttttttgtttgtttgtttgtttttgagacagagtctcgctctgtcgcccaggctggagtgcagtggcaccatcttgggtcaccgcaagctccgccccgcccgcccccccccgccccagggttcaatcagttttctgcctcagcctcctgaatagctgggattacaggcacgcaccgccacaagcggctaatttttgtatttttagtagagacagggtttcgccatgttggccaggctggtctcaaactcctgacctcaggtgatccacctgcctcggcctcccaaagtgctgggattacaggcgtgagccaccgtgcccagccacttccctatttttttccagaatatatcagagcaaatcctagacactgcatctttatgcttgtaaatattgcagtacatatctctaacatataagcactgaagaaactgtaaccaaagtgattattacacgtaacaacattaatatcatatgatgtccttaatatcatatgatgtaaccccttaatatcatatgatgtccagtctatgttcagatttctccaatgggctgttttggtttggttttgtttttagagacagagtcttgctttgtcacccaggctggagtacagttgtgtgatgttggctcactacaacctctgcctcctgggttcaaacgattctcatgcctcatcctcctgagcagttgtgattacaggtgtggaccaccatgcccagctaatttttttgtatttttagtaaagacagggtttcgccctgttggccagtctggtcttgaacttctggcctcaagtgatctgaacacgttggcctcccaaagtgctgagattacaggtgtgagctactgtgcccagccaattggctgtttttttgtttgtttgtttgtttgtttgtttttaacaattaaacagtctccccattgtatttgcttgtaggtctctgttcccctttcatctgcatttcttgttaaattggaaactttaactagaggtgttgttagattcagtttttttctttttcttttgagacagggtctcactctgtcacccaggctggagtgcagtggtgtaagctcggctcactacagcctccccctcctgggttcaagcgattcttccacctcagcctcccgagtagctgggactacaggtgtgcgccaccacgcctggctaatttttgcattttttggtagagatagggtttcaccatgttggctaggctggtctcaaactcctgatctttcaggtgatccacccccctcagcctcccaaagtgttgggataacaggtgtgagccaccacgcccagccccctatatcttattaatccatgtgtccatacgtcaatacaaccatacaaacattcaccaacccacccatctacctactcacctacttcctcactcattcattcattcatccacccacccatctatccatccttacacctatccatctttctctttttctttttttttttttttaagacagagtctcactctgtcgcccaggctggagtgcagtggcgctatctcggctcactgcaagctccgcctcccaggttcacgccattctcctgcctcagcctcccgagtagctgggactacaggcgcccgctaccacgcccagctaattttttgtattttcagtagagacgggtttcaccgtgttagccaggatggtcttgatctcctgacctcgtgatccgcccacctcggcctccctaagtcctgggattacaggcgtgagccacckcrcccrgccacctatccatctttctacccccctgcctctgcatgtcactgtccagccatccatctactcactcactactctaactgtccacccatccatctactcactcactactctaactgtccagccatccatctactcactcactactctaactgtccacccatccatctactcactcactactctaactgtccacccatccatctactcactcactactctaactgtccacccatccatctactcactcactactctaactgttcacccatccatcttctcactcactactctgtccacacatccatcttctcactcactactctgtccacccatccatctactcactcactactctaactgtccacccatccatccactcactcactactctaactgttcacccatccatcttctcactcactactgtaactgttcacccatccatctactcactcactactctgttcacccatccatcttctcactcactactctaactgtccacacatccatcttctcactcactactctgtccacccatccatctactcactcactactctaactgtccacccatccatccactcactcactactctaactgttcacccatccatcttctcactcactactctaactgttcacccatccatctactcactcactactctgtcacccatccatctactcactcactactctaactgkccacccatccatctactcactcactactctaactgttcacccatccatctactcactcactactctgtccacccacccatctactcactcactactctaactgtccatccattcatctttccatccatccaccatatccatccacctgcccacccatctgcttagctgggcattcatttatcgtaatcaagagtgatttgagcttcgagtcagtgacaagccaaaataaaaattaaaaatgtggctgggcacagaggctcatgcctgtaatcacagcactttggaggccgaggcgggtggatcacctgaaaggtcaggagttcaagaccagcctggccaacatggtgaaaccccgtctgtacttaaaaaagtacaaaaattagccagctgtggtggcgggtgcttgtaatcccagcaactcagaaagctgaggcaggagaatcgcttgaacctgggagggagaggttgcagtgagcggagattgcaccactgcactccagcctgggcaacagagcgagactccgtctcaaaaataaaaataaaaaatttaatatttacagcccttatttagcattgctcactttataacaggcacrgagctttcccggcatcctggagacaggatttgaacccaggcctgcctatgctcttctagtgagagcagtcctggctgggccaaggacacaaagatgaactcagtattgtcctgtatttcagggtgtgggggtgggtgagcacaggtgctaaaagcagcttcttacaacaatttggaagcatgacctgaaaccccctctcctgtcatctcccaggagccacctgtgttctggcccccaagttctctacttcctgcttctgggatgactgtcggcagcatggcgtgacagtgatcctgtatgtgggcgagctcctgcggtacttgtgtaacattccccaggtgaggctctaagattagggctccatggtgaacacccaagtatgaaatcccaggtaaaggtctcaggtaaagattcaggtactgaactcaagtccctcagataatacacctcatgcaagaaccccagataatgagtttcagacaaggcttccaataatggtttctttgatagctgtgctaccttgagcctcagtgtcctcatttggaaaacagggataatagcccctacccctatcatgagaatttccattaaaaattaattawaattaaatttccattaaattaaagttctaggtaactactcttaggtgagaccccagatgaggcctccagtcacctctggtaacgtcccccaggcaaagctctgaggtcgcccctgcaggtaaccctctatttaagactccagtaactactctcatgtaagtaacccaggtagatcccttaggtagaggtcccccatcaccttccaggtaactcccaaggtaaggacccaggataacaccccctctaggtaaaggttccaaggcatgccccaagagcacctcctcctcacccttctggggacattcctgtagcaaccagaggaccggacacatacagtccgcctggcaatgggcaatggactacgggctgatgtgtgggagaccttccagcagcgcttcggtcctattcggatctgggaagtctacggctccacagaaggcaacatgggcttagtcaactatgtggggcgctgcggggccctgggcaagatgagctgcctcctccgagtgagtgtgcgggtacctggtgtgcagctgccctgaggctgagcccacaggacctatgtcaacactccaccctccaccccagatgctgtccccctttgagctggtgcagttcgacatggaggcggcggagcctgtgagggacaatcagggcttctgcatccctgtagggctaggtatgggggttgaggagcctttcctgggtggcaggggtggcgaccctcagtcttctgcttggctggaacgagctgctcaaaagcttgacgttggtgctcactagaggggtctgcagccttcatctggaccctgagccagtggcctgccttaccaccatctggggcctccgcctcagcttctcggctctgtccagctcccctgccttgatctcttgctctgatttactgggtctctgggtgtccatctgatttgttctcttgagctttctgtggaagacggcattccagccattggtcccttgtcctgtaccttctgttagtgtcttctcccagggccttgcaaggtcctggtcatatctattctcactgccatttgtctgtccgtcttccatcccttgttatccttttcctgtttctcatgggctccccataccgccttctctatacttctctctcattttctgtgtcgcttgtcgcagtctctcaaggtctctgaatgtctctctcatctctggatctccctgtctgtgtctttgggtctgtccttggcagggtgctgggtgatgaagagtccaccgttgttgaaaacctccagcagggggcttggctggtgggctccaggggttcttgttcctgctcctaccccaggggagccggggctgctgctgaccaaggtggtaagccagcaacccttcgtgggctaccgcggcccccgagagctgtcggaacggaagctggtgcgcaacgtgcggcaatcgggcgacgtttactacaacaccggggacgtactggccatggaccgcgaaggcttcctctacttccgcgaccgcctcggggacaccttccggtccgaggcagggtttctcggggcggggctggcgcggggmcacggacgctttcagatcctagagggagtcaggctgaagaggcgggactttcctgtcgtaagagggcggaacttggagtcaggacttctcacgcgaaggcggggcttctcgattttcgagggggcggggctgactgggcctcctgatccccaaaaggggcggggcgggggcaagaggcggggcctctccttcccgggggcgtggtcacaagcgccggctccctccytgcagatggaagggcgagaacgtgtccacgcacgaggtggagggcgtgttgtcgcaggtggacttcttgcaacaggttaacgtgtatggcgtgtgcgtgccaggtgcggagggttctcattttaaacttccaacagctttgtgggtggaggggtcgttattctgattttacaggtggggaagtgctagggcccagagaggtttagagacttgctggctctcacagccagtgagcagagctgggcgaggctggagggtcagctatgggccctcgagatgggtcagccgagagtgaccagactgctctctaggttgtgagggtaaggtgggcatggctgctgtgcagctagcccccggccagactttcgacggggagaagttgtaccagcacgttcgcgcttggctccctgcctacgctaccccccatttcatccgcatccaggtgagcccagggtggcctggtgggtgggtggaagatcatagccagggggcgggtggatgtcacagtgattggaccatggtcactgccctgcaggacgccatggaggtcaccagcacgttcaaactgatgaagacccggttggtgcgtgagggcttcaatgtggggatcgtggttgaccctctgtttgtactggacaaccgggcccagtccttccggcccctgacggcagaaatgtaccaggctgtgtgtgagggaacctggaggctctgatcacctggccaacccactggggtagggatcaaagccagccacccccaccccaacacactcggtgtccctttcatcctgggcctgtgtgaatcccagcctggccataccctcaacctcagtgggctggaaatgacagtgggccctgtagcagtggcagaataaactcagatgtgttcacagaagtctgtatgtctgcgtggatgaaggagcaatggaggagtgcaggggctagtgccctgaagaccttattttagggtcttccctgtctcccagcaaagaacctcagccatccctgtgggatgaccctgtctgtgtaacgccaagggtgtgggaggagctggccagcctcgcagctgctctgaggtagagagatgagaactctgattctcatctgtgggtctttggtgggccactgaggcggtggctgggccagtggatgtggataactcccctgtgaagtgctgtggatacacaatctgacaaagcctggaggttgctggactgaggctagaagggcaagcaggaggtaactgggggaggagtgtccctggcactgtgaacggcacgtgtagaggccctggggcaagctttgtaggtggggagcagtgggagcagaggcctctggaaaatgggagtctgcacagtctcaggagttggacctgctacccgaagcctagtggagatgtaggtgggggtgtgtgggtgctgagcctctgcctccaaggcttctcggcccagtaggaactgaaggtgaggctacagacactggaacagttgtggtggtgccaggccggtggtccatgggttaactttgggagcacagctggggtgatgatggtgagaaaaggaaccccacagcagtaaacgccatatgcaaagggctgtccgtgggcagtgctgcagactgcgaccctgcccatcccttctcgtgtgcatagtaaacacaccccacagcaatgcttaagcacacctgagaatggccctgtgtggcagacgcacctgagtgtggttcagagttcccagctaaggaatctcagagattcattccttatttttgaggaacatctgggtccttagccctgtcccatggaatgctggtggtataagggatcctggccttttgctttcagttaaatgaaggttgccagggggaggatgttaagtgaaaatgccatataaactgcatgctttttgcaagtggttctcctgcccagcccaccgcccctggactctccccggtatgtaagcccccagtaaaaccctacatcttgtttgctggctcttagtctcttcttcggcctcttgaacctggtgctgtccccattggagtcagtaggggtttggcacaatactgtgctctcccgtgcctcagcctcctcatcaggctatgggccactttgagacagaactagccttcgaagggagcagtgcaggcagcaccccacgtgggctgtgaggcagctgggcttcacagagttcctggtagcattcgaggctcttcctgtcagccctgcagcctggagctgagacagtatccttttcagttggggtcccactatgagcatctgtttgtcattggtggtggccgtgcactgtaattctcttctgcgaagtgatagttgttgtgacttgctatttctgtgccctgtgtggccagtggagccccacatgttccctgaagagccctggccctttcatacaactggacttggatcctcccacgcacacagtaggttgtccagttccttcatactcctccagcctgggtgacagagtgagactccgtctcaaaaaaaaaaaaaaaaaaaaaaagaaccctcacgtccttgttagtatagtgggaaaaaaagaagaataacccttgtggactcacctggggccaggctagagctgatactttttttttttttgagacagagtctcgctctatcaccgaggctgtggtgcaatggtgcaatctcagctcactgcaagctccgcctcccgggttcatgccactctcctgcctcagcctcctgagtagctgggactacaggtgcccgccaccacgcccggctttctttttgtatttttagtagagagggggtttcaccgtgttagccaggatggtctagatctcctgacctcatgatcctcccacctcggcctcccagagtgctgggattacaggtgtgagccactgtgcctggcctagagctgatatcttcaccacatctcatgggatgagttgtgttgtgttgctcccaccatagttgaggaagccccagccaagagaggtgctttccccatgagttacttgccaagcccattgttgcaggtgttggatcagagggtgtggatgttgtagaaatatctcactgtggatcctcagctttacaagttcaccagcactttatacaaatccgtgcctccctaagccctagctagcttggggcattcatagtttttgctattacatttgcaaggattaaaaaataatatttgattagctgggtgtggtggtatgcacctgtaatcccagctactcaggaggctgaagcaggagaattgcttgaacttgggaggtggaggttgtagtgagccaagattgcaccactgcactccactttaggcaacagagctgagagtctgtctcaaaataataataataatttttgaggctgggtgcagtggctgaygcctgtaatcccagcactttgggaagccgaggtgagtggatcatgaggtcaggagtttgagaccagcctggccaacatagtgaaaccccgtctctactaaaaatacaaaaaattagccaggtgtggtggtgcatgcctgtaatcccagctactcaggaggctgaggcaggagaatcacttgaactcagaaggtaaaagttgcagtgagctgagatggcrccattgcactgcagcctgggtgacagggcaagactccgtctcagaaaaaataaataggcgggcgcggtggctcaggcctgaaatcccagcactttgggaggccaaggtgggtggatcatgaggtcaagagatcgagaccagcctggccaacatggtgaaaccccgtctctactaaaaatacaaaaaattagctgggtgtggtggcggatgcctgtagtcccagctactcgggagggtgaggcaggagaatctcttgagctggggaggcagaggttgcagtgagctgagattgcaccactacactccagcctggcgacagagcgagactccgtctcaaaaaataaaataaaaataaataaataaataaatttaaataataatataatttttggctgggtgcagtggctcatgcttgtaatcctagcactttgggaggccagggtcggaggaccacttcaccctaggaggtcaaggtcagcctgggcaacatagtgagaccacgtctctagaaaaaaaattaaaagtaaaaaaattagccaggagtggtattgtgcacctttagtcctagctactgggcaggctgaggcaggaggatggcttaagcccaggagtttgaggtaacagtgagctatcattgtgctgctgcactccatccagcctgggcaacagaggcaggaccctgtctctaaaataaataaaaattttaaaactttttcttattcccccactagactacagatctatgaagtgttttttattcaatatatcacacacgttattccttttctcttttactttccaaacaattttatttaaaaaaaacctgcagtacagtattaaaaagcaatacattcagcaggagtgacaaccaacagaaacaaagggaggagggtacggaataccagggaccctacctcaactgatcctcagggctggaggccaggggcagactgggaggagcacgggtggtggggaagggagaaaagggcacccaccaaaatgaacaggcagaacaaaacatttatataggaaatgtctagttgaacttgaggatcttggggagacggaaaagcaccttttttttttttttccaaaaatatcctggactatcagggagggttggcctcctggggcgaaatgagcaggcagagccctaccctacactctactattgtggaggggatgtgctgggggctggtgacacacattttattcttctttttttttttttttttttttgagatggagtctcactcttgttgcctaggctggagtgcagtggcactatcttggctcactgcaaactccgcctcccggaaccaagtgattctcctgcctcagcctcctgagtagctgggattacaggcacacactaccacacctgactaatttttgtatttttagtagagacggggtttcaccatcttgaccaggctggtcttgaactcttgacctcgtgatccacccacgtcggcctcccaaagtgctggggttacaggtgtgagccactgcacccttttttttttttttttttttgagacgtagtctcactctgtcacccaggctggagtacagttgcacaatctgggctcactgcaacctctgcctcccaggttcaagtgatgctcctgtctcagcctcctgagtaggtgggattacaggcatgtgccaccaggctcagctaatttttgcatttttttggtagagatggggtttcactatgttggccaggctggtctcgaactcctgacctcaggtgatctgcccgccttggcctcccaacgtgctgggatgacaggcgtgagccaccacacccagcgtattcttaatttcattctataagtctttctgtttctcctgtcccaagctgctgtaattagcataggcttgtaatatatatatatatatatatatatatatatatatatattttttttttttttttttctttttctttctctctttttttttttttttttttttttttgagaaggagtctctctctgttgtccaagctggagtgcagtggcttgatctcagttcaccgcaacctctgcctcccaagttgaagcgattcccccacctcagcctcctgagtagctgggattataggtgtatgccgccactcctggctaatttttgtatttttagtagagatggagtttcaccatgttggccgggctggtctcgaacccctgacctcaggtgatccacctgcctcggcctcccaaagtgctgggattacaggtgtgagccactgcacctggcggaattcctactctttacttttatttcaaaaccttcttagctagtcatgtgtcagaactctttcccatttatgtcttttccccccaaaattgctggttaggtatagaagtaaaaggtggtggagggcaccatgctttctttatattcttatgggtggctgctagtgtggggactggtttttttgtttttttttttcttttttgagatagggtctcgctctgtcacccaggctggagtgcagtggcaccatcatcgctcactgcacccttgacctcctaggctcaagtgatcccccccagtagctggggctgcaggcatgcaccatcatgccttgctaattaaaaaaaacatattttcttttgtagagttgggatcttactgtgttacccaggctggtctcgaactcctgggcttaagcgatcgtcttgcttcagcttcccaaagtgctgggattataggagtgattcactgtcctaggaaggattgtttctttctttctttcttcctttttttttttttttttttttttttgagatggagtctagctctgtctcccaggctggagtgcagtggcgcaatctcggctcactgcaagctccgcctcccaggttcacgccattctcctgcctcagcctcctgagtagctgggactacaggcgcccgccaccacgcctggctaatttttttttttttgtattttttagtacagacgaggtttcaccgtgttacccaggatggtctcgatctcttgacctcgtgatccgccccccccttagcctcccagagtgctgggattacaggcgtgagccactgtgcccggccccaggaaggattcttgaagtatcggtggatgccctcatgggaggaccagtgactctcacgaaaagcagcctttgttgtccaagtgaataaataatgcctttcatgtaagcatgtgagaaatacaggcagatgctgtagcgatggctcagatggtgacgtttcttacagactttaccaagtccacggtttcttctcatcctgccttttcctggatgcccgtgttaagttccccgctcccac

SEQ ID NO: 94608 - DNA, 26278 bp, Homo sapiens
cactgttcaaactactttatagaagtgtgaaaaaataaaacacattaattctcaatgtttctaatgttttaaattacaatgcaccaacaaaagtagttttactgtttttcatctacaacctacagtaactgagtttttaatgtttctattaaaaattaaattaaagatcacggctgggtgtggtggcttatgcctgtaatcctagcactttgggaggctgaggcaggtggattgcctgaattcaggagttcgagaccagcctgggcaacacggtgaaaccccgtctctactaaaatacaaaaattagccaggcttgacagcgtgtgcctgtaatcccagctacttgggaagctgagacaggagaattgcttgaacctgggagcagaagttgcagtgagctgagatcgtgccactgcactccatcctgggcaacagagcgagactccgtctcaaaaagtatgtatatattaaagatcacataacaatcctaatttcttcctattgattattaagaatgatatgtctggcttctgcttgcaaggtcactgtcatggtcccacaactattacaaatgcctatgtaatagttcatttgaagagattatttggtggctcaaatggaatccttttttcctaggaggatgggaaaggctggcagctcctctgtgtgtcctgaagttcctagtaaggtgcgggtgtttagtaaatgttattgacattgtattagcatacaatgactctgggtcagatgaagagcaatgttgtaacattaatagagccttagagacaaggtctagacttggtctatcactaaacccatctaagcctcagttttctaatctatcatgtgagtagtgacaatagtggtcctgtctaccttatggggttgattggaacctaacacatagaaggtgctaagtaaatgtctatagaaagaataaacgattcaggactcagtttgaccaacaaagttggtcagttaccctacaaagttctcataacccttcagttatagttgagttcctgttttacacaggaaggctgcctgagtgctggttagaatgaaggtgaggacaaatatttggagaaagcaagccagatccgttgaaggtacatatattagaaccccaaatggctattcctttgctcaatcctctttctcattccccttgacctttatactccttgaatgcagcctgaatggtgcaatttgggaagagaagaaagtaaaacaaaccttgagcctgaccatgaggtctctgagtggcacatattcttgtatttttagttctctctgctgcctcacttccttaagcaaaaacaaacagaaccatgctctagtcttccactccaaataaaagatcaacatcacaacttcccaccctgagctactgttgttctatatgttctttcatttcagctgccaccccaacaggttttccgaaactcttgtttcaaaggcagccaatgacttcattatttcccatagcctctactcggtacttctgttctctggatgatcagagagtaaagctttctgcctgctgaccccactctcctctttggtgctgtctccctccatgtttctgtgacatcacactcaaggccccaagacttcttgctttttgtccctaatgtgactgttgtcccatgttctgacatcaagccctttatcttttagttgtaagagttcttctgaatgagctcatcatcccagcactatgggtatctcaaaaatctctctctccagccctcatccctttctggcctcatgtttccatttatatagctactaatgtctcaagttcaacatgtctgcagtaagtctgcagtaagagaatatttcaaatgtgcttttccctcctcctgcattcattcaacctcattaattctagaaataggtcctggcccaggctaaagagttagacatgggggaaaagatcactctagatagatgcagagaacaaagggaattgatttttgactcctaagtttacatggatattgatatgggtctaaagtaaaaggtcttaaatgtgtatttttcaagagagtattccagtccaccagaggagatgaactctcaatgacatgaatggaagtagctttatgtttcttgagcaagtactactggttgcaagtgccctgaaagcatcatggaggcaggtacaggaacaatattaaatatctttcttattgctgcctgatgaggaccattaaacatgtacccaatacccattgttctttgattgcctcacaggaggaacacctatatatatcccaacactttgtcatcagcatcttctcaaatgacccacctttttggttggcccataacatttttaagactctgagaatggatggtaagagcattttatactgaagggatggagtggccaggaagctcctgtatctgggcaaatggaacagccagagagctttagctaaactggtgggaatacttctattaagaattgtctctatcaaactgattatctcctgtcctccctataaactcctgctctgtacctgctagttcttctttctaagttccctatttttgttaatcttagatatgtaggctcaaaaccctagaatcatattcaaaaatttctccctctggtgggcatttatggtactttctgctcatcacatttccctttgtctagaaatgataccccacatgatatctccaacttccctaccccaaaacactaacgggagagtccatgttcttacatgatcccattttttcactcatggctattttttattggttggtcccatggtaggtatttgaaccaaggtgggaaacagtctatatcagaaaggcttaagctgcaacaaaacacctggcagacagttctttaaattattttttctcatataacaagaagttcaaaggttagtggcccagtgctggtgcatttgctcatggatgtcatcaggaccaaggttccttctttctgactgctctgcaaacttttacatgggactttcagagtcttagtcacaaaatggttgctgcaactccagacattacatcaatattactatagggaagaattagggagaagccacagggactgaaaggataggtaccatgagttagtccctttcataaaacctccctgaaatggtatctatacctttgtgaaaaaataattttaaaattacaccagttaaagaaaaagcaagttgacaacactaaattgcattggatatttagactataaatataaacagctttaagaaccaattattttaataatctatgtaagcatttgctactatagacctaaaagtttaaaatacaaattctaggagaaaaaaatgaattaacattttaaaaattctacttccttggtaatcctaccacccccctcccatcaccccaccaaaatttctgatgagttgggcagaaggatgccaaggcaaacacagattttcagcaatattttgttactaattagcctgagtttctgtatctatctgaaagcaacagaactgagtgaatttggtaatacatttcttaactttggctttcagaattttataattgttgaaaatagtatagtttagtaaaaatagtgagaattctaggtgtgtgtgtgtgtgtgtgtgtgtgtgttgttagaaggcagtaaagctaccagagggataaacattagaactctctctaacatgcaccagcaggcctaaaataagttatgttcaacagggctttaggaaaaagttcgtaaggattctgagaagcatgtggagtttgaaaaatgatgtttatgtactaatacctataaggctaggcagaatcatctttgcaatagggtcacataaaaaatagttggaaagcaatgcaagaaactaagctaaaaaacagacaagaacttctactttacactttactttctacaacttattagaaactttttatttgtcccaactagttttctgatgtaagaaattacttagataggtgatgtctttttttcttcccccataccgacaaatacaacttaaatataagtatcccacttgggaacaatttgaacctccagaaaggtgatttaaactcacactaacaaagttattgaagcctttcttaagcattgaataacagtttgccagtagggagggtgctaggaaccagaggaagaaaggagtgaggcccttcgtatagagaggctaaggatgagagggatggaaacctggaatctagtatgcaatttgctcaggatcagcctttgtgaccgggcaaatgttcaaaacagtctgttcttacttagctttaactaactttatgggctttactaactttatgggtatttttagcagaattagagcaataatgagggggtttcttacaaataaacgtaccagggaggttccttttcatttgatgaggttcatttatcatcaccaggcccagcccaaccccatcacaggcatccagtagaggccatcaacccttcctacaatgacaattcttatttcccttcctccacttctaacttggcctcctggcaggttgcactatgaccaaaagctaattgtttttcttccctaaaagtcgcttagtcacttctcaatccaagcctttacttttcacagattctcagtggtgaggcttcggcaagcacacccaccttgctaacatcatgtcccagtgagagctgccaggtacagttgtgtgtggacaagatgccaattgatctgactcaaaagccattgaagttccatcagtgcatcctgccacaaagaaaacacttgtgggaaaagctaccagtggcttaaattattatctactactagaaattaaaatcatcccrgagacttatgggacaaattagcccatgacaatagttctcacacttttacgtccaggaaccatggagctgtggtatggttacaggggagacaaagacctgcctgtcaaatctattagcttctttcctcatttctttaaagggtgggggaagggagacagagtaggaggaagtgtggatatttgccttgcctagtttgtagcagttgttgtaagtattaaacgtgagcaatatttgggagcaccctacagtagtagaataactattttttaaattcttatttgttaatcaccaaaacacaccaagtcaggaattttctactggttaaccaaaacagtcacgttgcttttcctttttctaaaataatcaagtaggcactatagaagcaaggcctggggaaaccttttttttttttttttttttctgagacagagtctcactctgtcacccaggctggagtgcagtggtgcgatctcggctcactacaacctctgcctcccgggttcaagcgattctcctgcctcagcctcccgagtagctgagcctacaggtgcacgccgccacgcccggctatttttttgtagttttagtagagacagggtttcaccatgttggctggtctcgaactcctgacctcatgtgatccaaccgcctcggctttccaaaatgctagcattacaggcttgagccaccgcgcccggccccagcctggggaaatcttaaggacagaactgtgatgtggactcgatcacagaaagtcttctcctcgactctcttccgagtccattactagcttctcccactctctttagaaaaccatccttcagcaaagagtttcccagcctgcccatcccctctaaaaactctagaggaccaggacccagggcgaagggcgggtctatacagatcctgagccaggctctgtattcgcaaatcctgtttgaaaatgtaagcgggactgggatctctgccacatttccgccccagtccgccctcagcctcccagccctactctatcttctctccttggctgagtaaacagccgacccgaggttgtacgtgacaagaaagcctcttttatctctcccgtcccttccacagcaccgtccccgccccactctcttcccttcggaccagcccttctgggcgcgtcggattsttatctcccgccccgcgcagggacgccgcaggcggcgataggatccggactacagctcccagcgcgccccagttcccgcccccgcctccggagcccgacgctgcagcggctcttctcgaaaggttctttccgcctgtgcagctcgccggctcaatactccgggggtctgggtggggggctcaaacgcagggctctgggacgcaggcactgctccaggtgatagtgcgggaacatggccttgcagctgggcaggctgagctcgggcccctgctggctcgtggcgcggggcggctgcggagggccccgcgcctggtccyagtgcggcggcggagggctccgagcctggtcccagcgcagcgcagccggacgcgtctgccggccccctggcccggctggcacggagcagagccgcgggctggggcacggctcgacgtcgagaggcggcccctgggtggggacagggctggccgcggcgctggcggggttggtggggctggccaccgccgccttcgggcatgtgcagcgggcggagatgttgcctaagacctcggggacgcgggccacttcgctggggaggccggaggaggaggaggatgagctggcccaccgctgcagcagcttcatggccccgcctgtgaccgacctgggcgagctgcgaaggaggccgggcgacatgaagaccaagatggagctgctgattctggagacccaggcccmggtgtgccaggctctggcacaggtaracgggggcgccaacttttctgtggaccggtgggagaggaaggaaggtaaggaggccggcccctggcgggagttggagacagggaaaaagggtcaggttccaggttgcagacagaaaatataatagttcacaatatgggatggggtaggtagggggtacccacagagaggccgcttggttagaggccgctgataaaaagatggacacgaaagggtcactagccctctgcttgcaggtatggacccggatcagctgtcactgtagtactgcatttcaaaatctttgcaattccgtagcagcatttttttgtagaactcttaaggggtatttgcagctaacaagcttagatgtccaaagttcgttactgaacataaatttcaatagattatggaacacattttctctccttctctgggtgaatttgccctttttcctctttaggagatggaaagaactcatctcctgtgcgctaagtgtcggctaaactcctccagccaggatgtcattgtgtcagaatcttcccacttctttttactgttacacaagatatatttgattcgtttctcagtagcactaccaaatgcacgcatcagatttcctgctaggaaaatcttctcttccaatatcaaaatacttgagcatcaaaacccagttctcgtagaggcgtacattcatgaccatgttgttgcccatacagtgaaaccccacatcttgagtggaaacttgaaagattcctgacttttcctagctggaaatacaacagcagcttctcaccggcagattttgagctgtgatactgacacatctatattaaatgaagttcagtctagttttccatcttatgttttcaagcaaagaccactgaaccaggayacaacctcaagtactagaccagctgtgtgatcctcagaagttacttttttatggctgttttcccatctatgaaatatatatgtatttcatctcwtttaatcctcatactacatatatatatatatccatatacatatatatatatatatggatggaatatatgtgaagtgcttagaatattgtctgaagcatagacagcatttagacaaattgttgcagccacttgtcagcagtttgatcttggataagatgttttgcccctctggtcctcagttttctcatttggaatatatgagggttgtactggatcatcttatgtcccatccagctctaaatgttcttagaaataaaacaagccaaacatgaactttcatgaaacattgcccttgcagtgaccctaataccttaagaaaaaaaattagtaaggctgatacacgtgaatactaatgtgcgtctcactcactctaaggttctgaatcccttcagaatttgattacctactgtttcttaattgcttgtaaattaaaaggcaagcagcccactgagaaagaaatttttgaaacaatatwgatctcttaaattcagtaataatagaacacccttcaagtctacccattcctatttttaaccttagctttctctcatatatcataactgatagatgccattctgaacagtagaatctgaagggagaatattccagtgatttattttagatgatggcaggagaatgttgaagaaatattcagtttagtgatatgagaaggtcyagtatttgcccaatattaatagcatatgtcataaagctaagctagttatctaattgtattgtacataaaatgataaatacactgatataaaagatttgggaaacrggaaaataaccatcttcatgcaagtgttgctttcagttttgcacatactcttacattctctccttttttacatttctatacacaggaggtggcrgcatcagctgtgtacttcaagatgggtgtgttttcraaaagrctggggtgagcatttctgttgttcatggaaatctttcagaggaagctgcaaaacaaatgagaagcagaggaaaagttctgaagactaaagatggtaaatcagacagtcttgatagtctctaatagtccctgcaaaccttattttgcccacaagttttatttataaaataaatattgcttctgaaaaaagccattcgggttcatatgccgcacgttgacaaatacttttttaaaattatgtttttaagtgacaaattaaaaagcagcttttgaaaattgacttggaaatcatattagagtgaaattgtatcaaggcattcaaggtaactgaatatagctcatgactcatattttactttccaggtaaattgccattttgtgctatgggcgtgagctctgttatccacyccaagaatcctcatgctcctactatccatttcaactacagatactttgaagtaraagaagctgatggtaagggtctcaggagctacggaaagtactgtcgtgcaaaatgtgcattttaaaacagataagagggcataacatctaaaagcgagaaagaatagtcttaattaggtctttcaggaggcaatgtaaaggcaatttcttggcaagtgcaatggattatgcctgagacatgacaagtaagaatggggccaggcttggtggctcatacctgtaatcccagcactttgggaggctgaggtgggcagatcacctgaggttaggagtttgagaccagcctggccaacatggtgaaatctcctctctactaaaaatacaaaaacttagstgggcgtgctggcacgcacctgtagtcccagctattcgggcagctgaggtggaagaatcacttgaacctgggaggcggaggttgcagtgagcggagattgtgccactgcactccagcctgggtgacagagcgagactccgtctcaaaaaaacaaaacaaaacaaaacaaaaagaatggtattgactgactctaaccttcccatatttcctccaacatagaaggaatgaacctgaacttyagtgtgcacccagagttctttgcaaacataaattcattacatctgaaggaataccttatgtacgaggttaaattgaaattgagaacttgcttttggaaaatattttacatatgcatagctttgctagtcaccagggcattagcagtgggtttaaaatgggatgcagttgatcatgcctcctgtgcacatagttccagcctgtcttttatctgatacyagatgtcagagtacatgtgcagtgccacacctattcttattggtgtctctgtaggtgatggcatttaaagtcactgctttaacttttcattttgaagccattcagcttggttcaaccttttatgtttaaagttggtaactggtattgacaactcatggacctgtgagcacatgaaacagttattctcaagtggtaagttacctcagcaagtgtttttactctttctaggaaaggggaggggttggcaatggttcttaatacaaggagtgtcagaatctcctggggagttttataaactacagattcctgggccagagatgtgtgtgtgtgtgtgtgtgtttattgtgatctagaagagctattttaagctcgtcatgtgattcttatatacagccagagttgcaatccacttcctgatccaccagtgtactgttttatcattcactgccctgcatatcattccttgcaagttccactgtctttctttctttcttcttttttcttgttgttttgttttgttttattttgttttttgagatggagtctcactcttgttgcccaggctggagtgcagtggcgctatctcagctcactgcaacctccacctcctgggttcaagtgattctcctgcctcagcctcccgagtagctgggattataggtgaccaccacacccggctatgttttgtatttttagtagcaacgaggtttcaccatatattggccaggctggtctcgaactcctgacctcaggcgatctgcctgcctgggcctcccaaagtgctgggattacaggcatgagccacctcgcctggccgcttttacctctttttttctgcctaggccttactggtcttcagagctaaaatcagttaaaattttttttattgtcatccattttatgctgaaaaaattaagctgctaaattaagtgtcctaatatagccagtaatgctgaatctcaaaagtccacattagaatcccatgtcttgatttggtaggcmacaagcagtggtggtttggtggtggatgtgacctcactcyaacatacttgaatcaagaagacrctrtcsattttcacagaactctgaaggaggcttgtgaccagcatggtccagatctctaccccaaatttaaaaaatggtaggtaaagttactgaactttcatgaccccaaaattacattctgttccttctgaaggcaactattatgtcactaaataccctcttctgcttatgaaaatggaactagttttcttactttgctcatcagaagaattagaatactggttttaagtggttgtattaaattatttacttagaaatatttaatataaattgagtagtaatatctttttattccaaatgatttagaatggtagactatraactataaggtcatctatgcttgagaatgagaggctttttaatctggagtgggttgttaaattcttattccagatgagaattattattcctgatgttgacttgggaatgtctaagggcattggaagggttggagaaccactagagggagatgccaacataccagagattttggccaaggggaaagaagaattggagaatttgttaaagaaattctaatgataaaataagaaaacaaacaaaagttgggagaagacccagaatatttgttatcatcaaatggaatcttggcacaaattgtttggaatatgagtaaagtactcaattctgcttagagccaattggcattcttgaaaaaggaaggacaaagaatttttgtctttttgctttgtttttagagctaatagttgtggaatgttaatatttatgcaagagtatggagttcagctttaaaatcgtcaggaaagatgaaacatttgaatattctcttgatttaatattactactgaaaactacacagccatggatgcatgcagatactggttttttgtttgttttttcctctctctcagaacttagcatccttccaggaggactaatagagtagacagttctcttttttggttcctttttctagctattactgagatgactttaagcagtgttaggtaataaaatatctaggatggtagctagttaaaaagaagtttttagtataaatgctttggtttgaatatttgttccctccaaaactcatgtcgaaatttaacccccaatctggcagtattaagagctggggcctttaagaggtgattgggcagagccctgatggatggattaatccattcatgcattaatgggttaaattcatgggagtgggactggtggctttataagaagagacctaagctagcacgttcagccccccaccatgtgatgttgtgcactgcctcaggactctgcagagaccccaccggcaagaacactcatactagatgaagcccctcaaccttggacttctcagcttccataacttaagaaataagttccttttatttataaattatgcagtttcagctattctgttgtaagcagcagracactgactaggaaataagtagatcacttaattttgtaatgttttaaagagagattttgaaatagtatgatttgggttaaaaactgactttacaactttactcaggatatacttttttagactatgttaataaaatgtgcatataaagaaggccaacaagtcacgattaaggtgaattctacctatgcgtcagttctagggatttgcatctgttgttttttgttgttgttgtttaagcaattgaagctgtatttaaggtaaccttttaaatagcttttagtttttgtttgagcatgtttttctatttaaggacccttatgcagagattatcaaaagaactacttttaggatataaactattttacaagtttaacagttaggaaatggcttcttttttgtttgtttgtttgtttgtttgtttgttttttgagatggagtctcactctgtcgcccaggctggagtgcagtggtgcgatctcggctcactgcaagctctgccttccgggttcacgccattctcctgcctcagcctcccgagtagctgggactacaggtgcccaccaccacgcctggctaattttttgtatttttagtggagacggggtttcaccgtgttagccaggatggtctcgatctcctgacctcgtgatccgcctgcctcggcctcccaaagtgctgggattacaggcgtcagccaccgcgtccggcccaggaaatggcttcttaggaaacctgttctagtagtcatagaggggaaaagactcaagaacagattaatagttttatgtgctgcctcacagggtaaactttcatatgtctgatatgacatatgaaataataaargatatyatctgaacctttttttccaccaacttttccctgtctttcatgctatagaaccatcaaattttatttctgaaagagacctgagagattgtttatagtaccttcctttggtgaataaagaactcactcaagagagcttggatttgcaccatggttggtgtcattgttagtggaagattcctgtcctcctgcctcctacaaaagcagcagtgcttccgaaggcagcagcttattccaagaaatacactatcgatattggactgtttctcttttcactaaagttcttagagtttcacatcctttacagagacttgtgtgaaattgcctgttcgccttgaaaataagaggataagcagccaggcatggtggctcacgcctgtaatcccagcactttgggaggccgaggcaggcagatcacgaggtcaggagatcgagaccaccctggttaacacagtgaaaccccgtctctactaaaaatacaaaaaattagccaggtatggtggtgggcacctgtagtcccagctacttgggacgctgaggcaggagaatggcgtgaacccgggaggcggagcttgcagtgagccgagatcgcaccactgcactccagcgtgggggacagagcaagagtccgtctcaaaaaaaaaaagaaaagaaaagaaaaagaggataagcattttctaccttggtgatatctgcaaaaaatctatctgtctaaagtcctcatttcattttcatagttggacagcaagtaaggacaccatcctgacattagttgaggatagtgctgtaacctgaaaggctcacattgattttcatgtctgtttttttccatttgatccctggtttggcgccgctgtgttttccaggtgtgatgattacttctttatagcccatcgtggagarcggcggggcattggtggtatcttttttgatgatcttgactctccgtccaaggaggaggtgtttygctttgtacagagctgtgccagggctgtagttccttcttacattccccttgtgaaaaagcactgtgatgactcattcaccccccaggagaagctgtggyagcagctcagaagaggayggtaagtgactggaraacgaattctttcatggctaagtgggggaggtggagcagctcttaataatagcgggtgttgtgttgtcagatactttgtaatagttgtgttaatttcttttcatagatgaatattaagtgaattaaaagacattgtgtaaagtaatattataattatagcaaagtttatttaattcatctatacattagagactcatagtaggcatgtagtaagtacttcctgaatttaattctgctgatttctcttagtcttcttgtaatmccctccagccttatgtcaagatgtagacttcatttaatgtctttgctgctttgtaaatttggaatcacaccttttttcattcatcttaaagatttcacggaagttattttaatggaaataatttcagaaattttgctggcctctacattaggcattttgtatctgatgtttttcaacaaacctgtaagataggtgtaatcatcttttttcagaaagttaagtctgttgcccaagagacacagctggtaaatttaagatctcagatgtggaactgggtcaaaatgacctcaaaacttatagtctgtgtagtgcctaaagttaagcagctgaagcaggtttgtgcttcttaccatgatactcactttaaccaccctgttctgtgcagtgagcctggtgagctcagtggggtgtccagtctgaggctgtctccagccacggtgtacttgtaaatccactccaagttatacagcctgctggccccaatcagtttctcattgccaccttaaatgcctgtatactactgaaacatggctataaaatggattttctcattgacgttaattctgtgttaggcaaaagaagctttgggtactaaagaggtaaagcttttgccttaaagaggtcaacttaaataatgtttccagtctaaagataaacatttgtgtatatcctttcttatgactgcctgtgctatctggttcccatttattaacttgaaaaacatgagagtaaatttttagaaatttcttaaagaatgcatgtattttggaacatgttttttgtttgcttccataatttcttaaatatacctttaccactctttcctyctttcacttgatacttattttggggcccctgtgatgaggcactatcttggctacccggtggctgtaacatggacctgccaaaaagaacctcatagtttagtggggaagacatacccaagaggacaatttagaactctgtgcaaagtaaagtattctagttttgcacaagatttcgaaggcaaaacttggcagattttgtcaatactaattaggtgaatcctttaaaacttcatagacaggagtaatggtttgttttgcggttttgttttgttttttatacatcgtttgatggcagatcattctgaaagtcgttgttgtgtatcattgcatgtctggtgtcatgagataggcagaactgtggggtagtagattaattttctatggtatggtgtgtgactgttcttcaaagacagcttctttctgcctcccttatctctggtccttaagatggcaataaactctggggcctaasataactccagttcttctctggggctatcaacactgtctttggtttctaatactgcagtcatgaccagttttctgtatccttttcacttactgttacccactttgcctygtcttcaccctgtccaaacaccggtctccctttcagcagtcagtctcattcccttttgactttacagtctcttatttggcaatctcatccagtttcttgcccacagttactgctatcctcccccagaccttgaacatcagtcttacagttatccttttcataggaaaacagaaattaaagacttttaacttacttgttcgttgtattctgggaaagggaaacaggataaaatttaggcattagttaaattgaagggattggttaaagtccctaacttataggcaccccagagaggacagatgtatggaaaggatcagaaaagattaaataatattatttaaaaacaaatatgaaaatgctgcaactcaacactacttttattatgattgctgttaatctgcagagagactgaattatatgactgcttattaatgcaattaactactttaagaaagaagaatatatagaatatcagatctataccaggaataggagatggaaattttttattaaaaaagaaaaatcagatctaagtgcaacttggtgggaggtagagaggccaatgtagagaaaggggcatccttcacgcaataaaggaaaggatccaacagaaaattcattaaggaatctttacaagggtctctgcgataggtcttcaaatacatcartataaactagagaaccatacccatcccctagagagatgtttcagaaagataatatcaggtgaaaaaggtagccaaaagatgaaattattttccatggtcttagaaaaggattcagaagattcacttaaattattttttgaaacagacataagaaggtattaaatagttttttgtacgtaaaagtcaatgataaatggtgagagttagaaagggagcatagataaaattctttacacttttgcagggcttttgacaagttccacatacaaaaggtscttttaaaaaattaaagtattgtgggccgggcgtggtggctcacgcctgtaatcctagcactttgggaggccgaggcgggcagatcacgaggtcaggagatcaagaccatcctggctaacactatgagacctcgtctctactaaaaatacaaaaaattagccagtcatggtggcgggtgcctatagtcccagctactcgggagactgaggcaggaaaatgggtgaaccccggaggcggagcttgcagtgagctgagattgcgccactgcactccagcctgggcaacagagtaagattccatctcaaaaaaaaaaaagaaaagaaaaaaaaattattgtgggaatctagaggatattttgctatagatgggcatcaagacagtaaccaataggtaaataagaatatgtgagtgaagtttagaccaagggagtaatttctgaataagataagaaatgatctgaaaggggcactgtttattgaacttttcagattatgaatcagtctaaattcttttgagtagtagaaattatccttttgaaatgggagagggagacccgtttacatcytatgttaaaggcagatgcagggttttaaactggaaggagtccagatctgactaggggagttaacatattgaaccaagttttagttgatgctaagggtatttaaaaaaaaaatgaaaacactgcaactcaacactaccttttattatgattgctattaatctgcagagagactgaattatatgactgcttattaatgcaattaactactttaggaaagaggaatatatagaatatcatagtccattattaatagattattgttagctgtagttggcctttcaggtcagaagttttacaccatcttagtagtagtagttgtgggttacaggcagtgaaatgaaatstttgagtccaaaacattccagattatgaggaaggccagaaagagctgggttatcctgagaagggatgcatttctttttcttaattgttgttctgctttaaacttctcagctttgtgtcaattctgtttacttatgggaaaacataaccttgtattgtgactgctctatgttggggcagaatctatattctattgtttggtgggtagaatacccttttatttctgcctgtccagatggagagctctcaatgggctgtaggctggtgtcctctgtgccagttccagctgatgggaactggggggaagaacccacccctttttaagtatttgttatgggttagtcttaagattttattgagctggcccttaatgttatttgatgtatttatggcaggtatgtagaatttaatctgctgtatgatcggggcacaaagtttggcctcttcactccaggatccagaattgaaagtatcttgatgtctttacctctaactgccyggtaaggagataactcattttagtagttatccctacactcccaattcccaaacacccacaaaatatgaaagttaacactgcagatgttgtgcctaggtctttgttagttttgactttgctgattttataagaaaatcacagtcaaataaggcaaatcaaattgggtattttaagcggtgacatggtgaatcccacagctctatgagggcaaggagagactagagggagagagaacacaggctgagtcatggtggctaggaggtgagatggaccttctctgcctatttgtttttctgagaagaggtatgcataagtattaagctaaagaaggtttgcccatggatcacctgagtttctacactatatgaaaccctggtttatattaaaggtgtattttggctctgggatattaatactagccaaagcatacccaagagttgttaagaaactatttgtttggcaaatagtttttttaaaggtcaagttggtacaaggcacatcaggcacagtagagacaaagaagtataaggctttttttttttttattcttaggattttatttttcatttattttaagtaaagaggtatgtgtgtcattttttatgacgttttttgcttttgttttggacatgcatagaygrgagtacatgcattcaccctcagagaattccaaagaagctgaaattctggaagttctaygccatccaagggactgggtgcgttgatgcaggcagaatggctgtgcaggggtttggagggcacacgatgtgtgctccccatgccactggtcggcactttgccactgtgtsgcagttacccrtgccttagtcttctccactctgcaccctacctcgtggscagatgataacatgttttggatgctgtcmgtgatgaatggtgagatggcagattgtcagagtcaattgattaaacctcatttatacttctagtgtcattttatatgactagtttacaaaataggacattgagtttccaagtattgagataagggaatataaatagtattatatgtatcaggaaatctctcatcttgtttttgtttcatgtattttttaaagttttcatttgtgccacaaaaatctgtcgtggaatatattttattttcattaattcagtgaagttgagacttcatagtaattttagaatgcaacttgaaggtaaaaattttactttgtcaatactgaagtctctgctgtaatccttatatatctttctccagagaacataatattgtcaaatagatacacatttttctaataggtatttagaagcacttgaaatattcttaatctctgcatgtgttacaattcagttatttctgtagtttgtaaactctaaagtgacattactattattttagagatgtctaagttgtaattttgatttttgtggaaccattgtttgttaatgttgggattctctgcacttttgaatgtgaaagcttatatccctgaattctgatacttaagagttttctatttcagacatctctgtgtggaagttgagactaagaataatcctagggatgtcatgaatttaggcaatgtttctcatttggaaaatgaaatgagaaataatttccttctttaaagcaagtatatatagtatgagaaacttggaggcatttcatacacacrtttcttaggaaaatggacacattgaaaatgtcctcttttttatattagagattctgcagctctttgctcttaagagcaaatcacaacaggattcttaatgtatgatttctttgttcatatattatgaatgtattattttatttgcttcgtaataaagtttataaggaagagcatctcatacatatcattatcgtggaacacgttgaatgtttgtgattctgtgtggcctttttggggctggaaaatgtatgaattcttcaactgtcttacaagagatctgctaataaattttattattaaataagactaagaaatatttatattttttgttgccaggataatataggaaaacgcatatatttcttagtacagttgatccttgaacaacattagggctaggggccccaactcctccttactgcatgcagtttcaaatccttgtataacttttgactctcccaaaacttaatcactaatagcctcctgttgactggtagcctgaccaataacatagtcaattcacacatgttttatgttatatgtattatatactcttcttacaagctaaagaaatgaaaatgttattaaggaaatcgtaagaaagaagatatatttgctattcattaggtggaagtgaatcatcgtaaaggtcttcatcctcattgttttcatgttgggtaggcttagtgggagtagtaagaggaagagtaggtcttgctctctcaagggtggcagaggtggaagaaaatctgcgaagaagcaaaactcttcaaacctgtgttgttcaaggctcagctatgctaatgccatagttcctcattcctaggtattttactcaagaaaaatacaagttttgtactcaattttcatagcagctttattcaatagttgaaaattagaaacaacccaaatggctaacagcaggtgagcagataaacaacttgtgatatatgcgtatattaaaatactaagcaatgaaaaggaataactattgctaatgacagtaacatgggtgaacatcagaaacattatgccaagtgaaagccacacataaaagtacttactatatgactacattataggaaaacctagaaaaagcaaagctttaatgacagaaagcagatcaatggatggcaggggttaggggatgcagatttgtgaaaggggacaaaagagtattttgaggtgatttaaatgttttacatcttgattgtgatggttactagactgtatatacatttatcaaaattcactgaacttaaaatggaattttattgtatatgtgaataatacttcaataaatctaatactaggaaaaatataggcatataggaacaaatgttcagatcaacctcagtttagcttttaaaaaatagaaaatcactacatagtgatgatataatgctaaaatgctagcctatttagttgtgtttaaagctgtggcgggtaaatgaagataaaatttttctgtgcatttgttttcagttcttcaataaccacgtatttctactatggattagactatgtctgaaaagaattgcacaactactggaaaacagattatcctactgttattcaaagtgaatttctctttcaatttcttactggtgttaattcagtctacctgaagaccacagtgcacctccagatggcctgaacacctaactgtcttatgcatgcaggttcatggtaataaagggtgtctggaggggagaaatgtcaattctctggagcaaatttttaaccactattttctgttcatcactgtactctgctgaccctcctagtcagcagagtatttgagataagtgcttctgcacgctaaggagtacaagatttgaaaagccaaatgtttctttatgacttatccttccatgtgtcttttgctgttacaatatttagagacaggaatcttctgcaggtttttgacttgcatgtctgtacataggtgaggatgactcaaaggctcagctcatcttggactgcaggctgcattgcctatgggtggctcagagcacgaattccatggaaaaaggcaaaggcagtatggtggttttctgttctaaccactgaggttatgtagtgtcactttcttcacattccactggactcctgacaagtctgtcattaaggacagttccagattcgagtggaagggaattagatcccagtcatcttcaaaacctccacacagccttccacactcaaaaccacgaaatagattggactcaaccctccacattgccctaattagttcctgttgagtccccctttgaaatggctcctggtttccttcctctgccctttgccaccaccctactttagtctcacatactttctcatctgaacttttgcaatgctctccctgcctctgggcactctgacctttccctctcttcagaattattttcctaggtcccattatcaccaccctgctgaaatagtcaaagaatctcctctccagacagaattctaaagtcagtctgacattcaagcaatccaccatttaactcctacctcgtgtttcaggcttatcttctacatttctctgtgcacttcagtctcagaccatatactcaccactcaccacttttcctgaacttcccccaaattatatcccctctggccttttctcaggctgctgctatctctgcttggaatgtcttatgtgcccgctcatccttccatgcccattttaaatcttcttcaagaaaccttccttggagtcaatctcttctaccctttcaacacattttacttttagtattgctgtcaacatattccatttacagtcattcaatccacatcccacttattacaaaatattgaaggtggatctttccttatttatagtacctgctacctaatgaatgatgtgttaacctttgttttccaacactgttttgcaatatatcgtagtatcaagcttagtgttgtttagttgtctgtataactgtcttattcctagtctgtgaaaacagaagttcccagtatctctaaaagcccatttagaaattgttttcaaggatgtattgtattatccctgccacaagtatgaattatgtatttgaaatctcacattttaaaatttcatctttcttcccaaagaaacacataacaatccaatttcataataaacctaaattagcacatttaagttagtgacgcttagacatttgtaaatggcttgactaaattcccttgtattgttacctgaaatcaagtcataagttgtacaacataaaacctcactgatatggttagggtttgtgtccccacccaaatctcacctggaattgtaatcccccaaatccccaggtgtcaagggagagaccaggtggaggtaattgagtcatgagggtaaaccatccccgtgctgttctcgtggtagtgagtgagttctcacaggatctgataattttataaggtgctcttcccttctttgctcagcacttctccttcctgctgccttgtgaagaaggtgccttgcttcccttttgccttctgccatgattgtaagtttcctgaggcctcccagccatgctgaactatgagtcaattaaacctctttcctttataaattattcagtctcgggcagttctttatagcagtatgaaaacagaataatgcactcacagacctgtttctacaagttgctttttttttttttttttttttttttgaggcagagtttcactcttgttgcccaggctggagtgcaatggtgcgatcctggctcaccacaacctctgcctcctgggttcaagccattctcttgcctcagcctcccgagtagctgggattacaggcatgtgccagcacgcccggctaatttttttgtatttatttagtagagacaaggtttcaccatgttggccaggctggtcttgaaatcctgacctcaggtggtccacctgcctcggcctcccaaagtgctgggattacaggcatgagccagcacacccggctaattttttgtatttttttagtagagacaaggtttcaccatgttggccaggctggtcttgaaatcctgacctcaggtgatccacccacctcagcctcccaaagtgctgggattacaggcatgagccagcacacccggctaattttttgtatttttttagtagagacaaggtttcactatgttggccaggctggtcttgaaatcctgcctcaggtaatccacctgcctcggcctcccaaagtgctgggattacaggcatgagccacggtgcccggcctacaagtggttttatactggatattcactaacatataccagcagagcaaggtagttgaactgcatttcctcttccgatcagtgtagccagctctattctagatcttaagctcattcaaacagtattttcaataattcttttactgttaatcccttcatatttcaaaatgcgtttgaacataaaacttgtcataatccaagccatcatgggttcaataggttgatgcaaaaccagccccttaggaaagtaaattgacttgccagtcatttagagttgcaacactgactctgtcatggatgtgttttctaatgagatggttgagaggtatcacagttcacaaagctgtactggctgaatgcctcctatgtaatagcaagtgaataatgctttcataaataaaagtctttatagcaatttatctatgctcagatcggttcaagattgcttccattttctgacttgatgagggagacaggcttttagaatctgttccacacctgctgcttgacattcttctaaccattagtataatatacaaatccacaatttcttgtagttcaaactgtagtttattaaaaataactagttcagatgtcctcaaagaccatttaaattaatactacctgaatacaggctgggcacggtggttcatgcctctaatcccagcactttgggaggccgaggtgggtggatcacctgaggtcagcagttcaagaccagcctggccaacatggtgaaaccccatctctactaaaaatacaaaaattagccaggcgtggtgatgggcgcctgtaatcccagctcaggaggctgaggcaggagaatcgcttgaacctgggaggcagggggtgcagtgagccaagatcgtgccactgcactccagcctgcgcgacggcgcgaaactctgtctcaaaaaaaaccaaaaaccaaaaaactaccttaatacaaattctgctgaaagtactttttgttttttaatgtgtacttgatcttatgtgctattcaacgtgagtgtggtgcttaaaaataatgtattcctaagaagcaaaaataaggacctactttcatctttacctctctgccacccaccccgactcttcatcttagtaatgtgtgggagatatggtatctccccaaacagcaagaggcagtcttcagctgacgtgccctcgtgtgtggaacaaagacaagccatcgttgctgtgccctatcagaatccctgactcacagaatctgtgagtgtgataaaatggttgctgtttatatgtcattaagcttggagtggtttgctaaacagtaatagataattgaagcagattaaatgtcattaacaaaaacgagaagagcagttttgaggtgcttgaaatgcttgcaagctacctgtaccagtatttagagatgtgaactcaggagagctcagtctagaaacacaagtctaccaattttgtaaaagtgataattgaagaagtggaagaaggtaagccacccaaggaagtgcatgcagtgtaataaaagagcatcacagaccgaactgggggcagagaaatgaacacgggatgaggtatcaggaaagacagctagaagcagctatctgaacaaatagaataggaggaaggaaatttaaagagacaagtgggatgtgattgtaataaaggctcaaatattacaatggttgtttccaaatagaagatgttaacatgatctatactctatgttaatatgtttaataaattgggatttaagttaacacttaaaaatgatcctagtttatacattatcaaggtcttctcagatactaaaatttagatgataaaattatctccattaacataccaggttgtgtcttcagtttctcaagaatatgaaattcttgaaagaaccagtaggtggagcagaaaatctaatctgcagggggttttttgtttgttttttttggcagggagtggaggaggagaaagtaaagaaaagcaaggaaggagggagaatgaaaaagtgctgggaggaagaaggagaaacgagagagaagaggtggagaacaggacagaaaaagaggagaggcaaagaagga

SEQ ID NO: 94609 - DNA, 117828 bp, Homo sapiens
  misc_feature (1)...(117828): n = A,T,C or G
cagcgtttggttcttttccctcctcattaggtagaaatctgggaactgaagacttagaatttgacgtgaggtgaaagggagatgtgaataaagaaaatttggaagtattatcaaacttcagatttagaataggatcccatcattttctgttatgggcaaggaaactgaggtctagagagattaggagccttgctggaggttatatagcactttcaagcagaaattgtatacaagagtcttatctagggctgtttccattatctcacaaaacttaatttctcagaatccaaagagcatttcaactctgtacatctaattctcaactgcgttgccagcaaaagtcccacaggaaaggatacaggcatatagcaggggaggcctgcaggttacctaaatcatattatctcagatatactagcatggtcactattcacattttactgctatgttaaccatccatgtataattaatttcctaatttctaggcatgataataatgttatggaaggcagttttcacatgcttttactaaaatcctttgaaatctccatcagagataaaatactagactgaagccttcttcttgtcatgacccataagaaaatgaattggttaatttcctaaagttcctagaaaaaccaagagtgtgagagagactggggcaagagatggagagagagaaagagagtaagatggttgcagtagatgaagatgcaaatggaaaatgctaaaagttagtcatgttgctgatatatacaaatgttaatcttttaagagaaatatttaacattatcatccactggcagaaattaaataccttctataataaattagatttctggcacttttgccttaaatttgctataacaaatatcttttaaaaagtttataagtgttaagaaaatatgagtaataaacttaggagagttgactgaaataagtaactgaaaaaagcatacaagataaagagaaaaatgtgtccaaaacacttctgttcacagaaagaaagtgtcttcagcggaattcagacatttagcagcaaagttggctgtaaacattttcccaaacagtcaacaggacaaagaaaatgctcctgtgagaacagtaaccagatcttaaggctctggtctttgatgtttgaagtattttcccagaactgccacaatcttctttctctcctaccccactggaagatcacaaaagtacattcttgttcattccctctttctgttatcctgccaaaaatacacagtcactgataaagctcaccaatgattcattacataccatcctcctaaggtttccagtataaatgccatttttaatgagcctcttttgtttcattaatgctaacagacatttaatagcaatgatgggtgccaaatgattcttacggtaccatttcattgaaacccagatgtttctgcacagacagaaacaaaggcaccagcccccaggttcttttcctacattctaatttccttagcagttggctgagcttggattcatttgaaagtaggaatagtaaaatgtaactattctttttatatttccccttttccctatagattaatttgattttcttcattcttccatttttttttttttttaatgagacggagtttcactctgtcacccaggctggagtgcagtggtgcatctcggctcactgcaagctccacctcctgggttcatgccattctcctgcctcggcctcccgagtagctgggactacaggcacccgccaccaccacacccggctaattttttgtattttaagtagagacggggtttcacggtgttagccaggatagtctcgatctcctgacctcgtgatctgcccgcctcagcctcccaaagtgctgggattacaggcatgagccactgcacccggtctttttttttttttttttttttgagagggagtcttgctctgtcacccaggctggagtgcagtggagcaatctcggctcactgcaagctccgcctcacgagttcacgccattctcctgcctcagcctcccgagtagctgggactacaggcgcccgccaccatgcccggctaattttttgtatttttagtagagacagggtttcactgtgttagccaggatggtctcgatctcctgacctcgtgatccgcccgcttcggcctcccaaagtgctgggattacaggtgtaagctaccgcgcccggcctattcttccattctttactgattaagaaacatgaaataaagaatgagaaaaagaggaagagagataaaagataaaaagaggagaaagagctggtaaattaaaatttaggttgagaatctatttttatttttaaatatcttaatgtagagtaaacaaccagaaatacaataaaataatacacacttttgaaaccctgtaaaaagaagccagaacctgggcttgccttgtggaggaactgtagcttcttggagcctctatgtgctacaatgatggccctctccaaacctatccactttgagacttgattagaatccccagttctgcccctgggttatgcatctgggttgcatgggtaaaatggtcctggacaagtattgctcccactgcctcataagatgtcattccccaaacaaaccaagtccccagaagcaaggatcatgacaaagttgtctagagcagcatgcagagaataagaaaggtaatataaactagaattccactttacccgcattgtcttagaaatgaatgcctattatattcctttggtgtgaggtcccaggagaaaattttgatcatttcagagcagccttctgtcattgtttggcaactaagtagagagacaataatcagaagagagaatatgggtgcaacagcatcaatcctctcccacatctgtgctatatttgtaattttctatatacataaagcaatagggggcaccacaaatgttctctagccagacttccagaccctgtcttccaaagcgaaactccggaagctgaggcataaaataacacagaaatagtcaaatggcatcagtcactaagaccttctgattttgctgctttaaatataactccaacttgctcccacctccctctctttttccctgccagtgacctaattcagaacctcttcacctctctagtctctacttttaacaactttaaaacactagacagtaagtaaaacagtgatgagaaatgtaagtgctccttcctcttgctttacacgtatgtagtcgggatcttttcctgctatattaaaggggtaggggttgctagagaccaaattttgcctcttccagaaatgctccataactgtgctagttcttaggtgaattctctgcctctgccacagttctatgtagtcaatagaatgccaggctaagattcacactaccttgctctgccaccacatctgtgacctcaagcttctctttcaatggtcctatgaaaggagtgattcaacatgaaataggttgtctcaggcactactactagaaatcttatttcatgactgactgcttgccacattagcacatcatgtctgataggttcaattctgaatttatgatttttaacttctacttctttatccaaccaaaccaattctccttcttgtactccttactgtgggaaagacatcaccttctaccagaaacctggagacttcctcaactccttacactccacataatcagtcaccaagtttaaaaatattcccctagttggtcccgccttcccaagcccacttttaatgcactaaaaactcaccatcactccctttaactgcagactggctctccctggcttccagtcttgctcttacaccaatgtattcctcaccctactggctgattggggtttttacaataaaaacctgataatgaccgggcgcgatggctcacaccgttatcccagcactttgggaggctgaggcgggtggatcacctgaggtcgggagttcgagaccagcctgaccaacaatggagaaaccccggctctactaaaaatacaaaattagccgggtgcggtggcacatgcctgtaatcccagctactagggagactgaggcaggagaatcgcttgaacccgggaggcagaggttgcagtgagccgagatcatgccattgcactccagcctgggcaacaagagcaaaactccatctcaaaaaaaacaaaaacaaaaacaaaaacaaaaaaaaaactgacaatgtcattctttcttagaaccctttagttattttccagtgatacaaaataaaatcttgactcttagcttgccttacatcttgcccctcctaacttttccagactagtctccagttcctcccattacgtcagcagtagtcaatccagctccatcaacaccattccctattgagcctgtgacccagcctattttgcctctggcctgagatcacctttttcactttagtttcttattcaagacactggcatttcaaactgacgggtttttttgaactccgttcactgtggtattgtggcaccagtccacacctctaacagggcactaataacaataggtttgtttacatgtcacctcctcctccagaatgtaagttcttctcagtaaactttttatgcccaatgcccacaatggcttagagcataatagggtttcttaggcatttaataaatgctaattgaataaatttggttaaagagattattgtataagaaatatgcaggggagttgaaacatacgacctccaaagtcctttccaacttagactttcattgaaggatatcagtcccttccatgtttttgaatatcacatctatgtatgactatgtatacatatgtatatgtatacatgtatggctatgtatgactcccagagccataatttcaaagctctcaatctgagctttcgactaaaatatccatctgcctgttacatagcttcacttattatctaagttggcatctcaaattcaatacgtccaaaattaacttactttcccacacaacttgttccaccttagcagttttttgtatttgctaatgacaccattgtcctttcagggactgctgttaaaaacatcctacatggccactctcttctaaaataaatcactgcgtagacctctgcattcctctttcctaaaattctttttgtcgttccataggcttacagtctccatcaaactgcttgtgactctaattagcacttacttcattctgacttgcatgctatatttccatctctgttccacatttcaagatttctgtagatagacagcaggtgctcaacaactccttgtagaatggctgcatgaaggttgggatgttaggtttaaattgcctttgcggcacggatcttgttttacacttttttgtcccccaccccccgccataaaaagagcagagaaaacagggaacacatatattaaaaactgaacactgcatctattattctaactcggagctgttgcaacaactggcggcagttttaacaaaacaagccacgctctgccattaaaaaaaaaaaaaaagtcccttagactcagctcccagctaaaacaacccaggatccaggtttcccacccccttccagtggtctgatgtgcgtcggaggagcgaggagaaaggagcaaggagcaagctgggcctgaggagcagggagcgcgggatgggggacgtcccggaagtcactgacgagctggctgccgcctctgcgggatcagtttgggctgagggcccaacaataacaggcgcccgggccgggcgggggccgcggggatccgaagctggagggcgggacctggattggaggaggcgggtgggacgcctccaaaggccgaaggggattggaagagggaggtaaggggcggtggagctcgaggaatgggccggagaactagcgggtcgagcgaggagcgagcatgctgattgggtttcgcggaaggagacggaccagagctggccgaggattggccgcggtgcctagggggcgtggccggcgcgcgcgagagggagcgcgagggagctggctgcgggcctgcctgccagctagccggagccgcgggtgagcgcggcgagcggcgaccctggtgaggagcgcggcgcgggaggcacgttccttagctccgccgcggccgtcctccgcggctcgaggactccgcttccttccctcccctcccctgcgctccggcctggggtctyggcgcggggagcggagggaagggacgaaggaggagtaggtgaaagcrgggtgaggggcggaagggtcccggcgcggggtgaggcgagggctgcctcttgttctcccgccgctgccgccgtctcctggtcgggtgccgcggccagaggcgcgcggggctgccgaggcacccgcactatgcaggcagactgccggccgccgcgatggcgagccgggcggtggtgagagccaggcgctgcccgcagtgtccccaagtccgggccgcggccgccgcccccgcctgggccgcgctccccctctcccgctccctccctccctgctccaactcctcctccttctccatgcctctgttcctcctgctcttacttgtcctgctcctgctgctcgaggacgctggagcccagcaaggtgagtggtcccaggggagtgagcggcgggggaacctccgtcggggctgcgggtctcttggcccctgaacaaatctgcagacgctgcagggaggcgcggtgcgctttcgtgcgtggccggacctggctgggtactcacggggttgagttgcaaaggcaaggtcttgcccgtctgtcccccaagttggcgcggctttactttttggcaaggccatttatttttctgaaagggggacgtgagaccctgctatgaaagcctcgttgatattaggtccttctggggaaaattttggggaggaaaaagaacctttggaggtaatgacccctaaagttaagctgcacggatggatggacactgtaggaaggcaggttaattaaatagcatcttaagcctattaaaggtaagtggtggtaattatgatcctttgtgaaagagcccgggttctgaagcgaatggaatagtttctgcttatctctgagtcttggattcagaacatgttctttacaatccatcattgaggctggtggtctagactgccttggtcaaacactgggtctgacccaacgctatgctaatttgcccaagtgaagctctccacattaaaaaggtaagcctttccagaaagtgacaaaacttttttttttttccacctacaatccttgaaaaacctgttccagaaacaggcaaaactgtttattaaatacttatcataatggaaggagaatgcagggtgatttcttttcccctttagtactgttttcccgtagtgtaccacactttttgaatcagtttggcatcagtttttgaaaagatatttccattgcattttccattttattgcagtgggaaggataaggattggattgttacttattgctaggaagagagttttttaaaaagaaaattgttctctrcctttaagcccagctttatgttgctctcatggttttcagtgaagtatggaatcatggcctgtcattaagaagatgccgaaccttgacaggcatgtggaaatataatctctgtaactataaggaaaaaatgtatttggcaaactgaccccttacatctagacacgtttctatatagagtaactcaaaatttagatgcttagcatttaggttttagttagatcgtcttctaaaattactgaacatcatcatcatttaatatattaaagtgtgaaatccttctttccactgtagagatgtatttccctcctggtaggggggaaaacaggcttatatatggctaacacttagggcttactttgtggctggaacaactggactaagtggtttgggtttattaactccttgaatcttcactacaatcagctgagatagttattgttatcccagttcaaamgtaaggacattgagacacaaagaatataaggtaccttgatgcaggagggcatattactccataggcagagtactctgctttgcttgtttctggatctgatagtgtttgtatcatgttattaaaaaaaatcttggaacagtatagaatcagttacatgtctaccttccaaatgagggattgccttgtttttagaaaaggccagtctaccgggcgcrgtggctcacacctgtaatccgagcactttgggaggctgaggcgggcagatcacgaggtcaggagatcgagaccatcctgaccaacatggtgaaaccccgtctctcctaaaatacaaaaaattagccgggcatggtggcacatgcctgtagtcccaggtactcaggaggctgaggcaggggaatcgcttgaacccgggaggcggaggttgcagcgatcgcgccactgcactccagcctggcgacagagcgagactgtctcaaaaaaaaaaaaaaaaaagaaaaagaaatagccagtctaatcagacaagcaacattacttcattttttaaggtttaatataatttttttttaccagaacattttaacaaatacatttctctttaacagtgtcatcttatgtaaacatcaacataaatagaaatgattctgataattaaaagactttttttttttttagttcttctaaattgcttgggtaaattttgctaaatcatttaatatttaatctctttgtacctcagttttctacatcattaaggtgagcatgcatacctatctcatagcttaatataaatgaaatgatagtatgcaggaattttgcaaagggaaaagcttaaaatagctataaatgattattactaatctcgatcttactaagttgataaattaagagctaattaggtatacatcatctgaaaactcacaattatttgagatttgaattttctcatttttaaaaattaaattttttactcaaaggaccctaaagcagcccgtggtggaattccttttaagccagtcttcccagtctaacagatgttctttagggtctactgatattccctcacataacctgaaaagaagtctgtttaaaacacctttagaatttttaatgggatttgtacatgttgtaatgttcagctacaaggtagagtttttactctataagaagtcttaagactggaaggaaataaactgttgacagttgttgtcttttggtggtaaaattgtgggacatttctttatacttttctaaattttctgtaattcgcatatagtcagaataaaaattaaactgcaaaaaaggtttctttgatagattttttttctttatttgacaactgaaggtagaaatgcatctagtatggagaggtagaaatgtgcttcagtgtcttttttctttctgacatcattttgaaatagcagaatatattaccttcattccaattaatgtcatacatagctattcctcaatagattttctgttcacaatgacctttctttttatttggctccgaataaaatgtatcattagtttgaaaacttaccgacttttcacaacagatgtattttaaccagttctgtttcacttataaatttataaatatattctgtttacctctatttattatgttgatgtttcacatatggcttgtatttgtgtagagttctaagttggatatcaagaagttggtcttygaaatcttttttattgaagactttttttctgtaaaatgtacmtctcaaaaaaattaaattggtgaaacttatgctggtagcatatttgctattgtattaaatttattggaagttgatggtttactatgattttaggtctctggtttccattatgactgtaggaatttgggttacttcatatcaggagctcagcttcctcatttgtatcctggaaggcttgcctactttcttggttagaatgtaatttgaacatggtaaaatatcagggaattaattcttaaaaaccattaagcctgatttgtttgggcctattaatatataacatgttgtgaagatattagtttttctttgctaatttaatctgtgaaacaaatcaggttcattcttaaaaaggatgtttcagttatttgaacatatttggaaccaatatgtgaaaaagtttatattctgtcaaggaatgcctttatttgcttgtgatgcagggaaatatttttgaacaatatttgtgagttgccagaaaataaaaacttatttctctctgcaaataaacatttgtaattatttttcacattgacattaggttaatttagaaatttccattgtcttttctttgtctgataaaacattggggctcttatccagttttgttcagaagcaaataaatcaaagcatccttttctgctatatttctaattaattttacaaaatgaaaattagaagcagcacacaatccacacgtgtgaatgatcagattgaaacagcacatttttgaaacttgtaaatgaaaaattgattctaagattgcaggtaaattataggtagatttctcagtgttagaaacaaaaagaacatattattttccctggggatagttgataattccatttgaacatctgagcctcattttaaagacaaacatgtaaaaatatcttaaaatggtggaattggcataagtaaaataccagtagtagaattaaaatgacaaattaatttccaaaagttaatagatcatgtatgtgggaaagggctagatttacataggagtagaatttaaatttaggactacacttagcaaagtgacactgggaagtgaagctcaggtagtaatgttggacattaattgaatgcatacaagtagacagtttctgcttccacttcttgatatatttggaargatatggaatgatgacccaacagtagaaggatgaggaaaagcttcataaagatagtgatatttgctaagtgtgattgttgaaatatgaagtgagacaatttggcaatttttctgatgyggctcctggattcggttttctttataacaaccttacggccataggactttgtatttatttttaaatattgtatggataacaatgattattactcaaaactaaaaacgtagatgattatccacatttctgtcttctaatccatcgacttataatttttaactttcctttctattacatattcacatacctgcataatcttttgtagttgtaattttaatagtgtgttcatgtaaaattaacttataggctaatttagcacacataagcatacctacaaaatacagtaaaacaaaaatttcaaaatgcaaaattttatcataagacattcagtatttataaagtaattactgtattgttcagagctgttattgtatttaattgaattcttcattctggagaaaaatctttgagaaagtatttcagttcaaaatgttagtttagaaacaaatatcaggctaatttttcagttcattatttgggttaaattagtacaacctatgaggacagaaaatacagatattcaaataaactagtatctaatgagtgccagtgcagtacccactgaagctgatgagatactcatgatttccaagggctactaaaacatcattcaccagctgaacgtgcaccctgatgggtgtgtaattgaaagaaaaactttgatttgctgcttgaattatgggagaatcccaagatgcacgttccctcaactgctttttaaggagagtggcccagaattccctgcaaggcttttgttgagtagggtgtgtgcaaccttgccttcaaaactgaattgcctgggatcaaagagaaggtattggcactctttatcattctctcattaagaactatcagtatgaaggggtaccaactgtgaactctcaagagagtgtgcatgtacctcagtatagtcctgagacattcagagaagagtaaaacattgttattgtcttcagagaacctacagtctatttgagaaagtaattcaagttggaatatatataataataaccaaggaaggatatcagaaggttatgtaaggcagagagaactcaccactcctggagaagcaggagacgcctactataataataatcaaggaaggttataagaaggttgtataaggcagaaaaagctcacaactcctggagaagtaggagacgcctcactgataaagtggttttagattggtaagctttgaagtttggtaggtttcttgtccacaaggaacagcagatatttgaagagtaagatcataagattataacctggggagtcaggaaagtgggagtgtgaaagcccacccttttagaatgagtagcaaaactcattctggtcatgctccactgtttgcttcttgaactcatgccctgtgtctgcccagttattggaaaaacgttggttggttactgtgggccaggcatggtaccacatgctggggcattttcctcttggagctgtgttaatgacttccatagtgttgccagcagcccctttatcatctgtaagataccgtccaaactcctttgcgtatcatgtaagtaatttttttcacagtctggtccctccctttcactctgacttaatctaatgccagcatttctcacactgtatagttcagatatgagactgagctaattttattcttctaagatataatttcatgccattttgccttgttccctatactaacctcttcatatatgcagtttcctctacttgaaatgctcttactttccttgtcttctcggtaaactctcgatcagccttcaaaacccttcttgggtatcatccctttatgaagagttctcgaacagtccccacacactcatctccgrataatacattccacactgtattctaagtatttattcctgccagcggagagagttttattcattttcttatttctaatacttatcatagtgtctgtcattcaaattatgtgaattaagaaccccatttctagagttaatctgctaccctgagcacattatttggttcatcccttggcaccggcatgcacttcatgctgttgtcctttgcctaatccccgtaaattagtggtcagttcaggagccgggaacagagccatgtcttsacccttactacctgtttgctcagagcctaacagtcttcccagcctttcccagtcccacctcttcccaggaggaagactcctttgctgcacacccttgactatgagaggaatccttcaagctgaaattctgaaaatagacatgcctacttcttagaaagctctgctcccctcagatgggtcatccttaacaaccgtgacagcctaaatcagtgccagcaatttgggcacactttctcctttgcatgctttcagcttctgacttcaataggcatctccaatattataaaagtccccctagtttttgttctygtagttgcctgtctcctttttcttgccagtggatgttgctggggagcattcaggtagcttcactaatctggtgtaatagaaaagtaatgagaaatggaggctggaacgtattgtggaggacttcccattgaggggcagactgaggagtttgtatctgcgatgttaggcctgacattagcctcaggtgcttcctctttcacctggttcatttgtctgtcactaggtttggttatctcttctcaactcaggcaccccaaatccatcatctcaacaatgctctttccgtgatcttggacagttcccaaacttgggcccatgtgataatccccattctctgctttctctggttctggatagctcatagttacaagattaagtcatgtggtcatcrtgattagatctgccacaaatgaggtctggctaatcaagtcccaagtggggattactgcttagcagactatctcactttgtaaagctgatttgtacagccgaactcctgccctgctcctaatccttgcacagtatgacttcctcctgactgaaacctkgtcctcttcctctttatcagagcactgctacattggggaatgtgaattttgttttggcatgctttacactttgatggcacttttactttatatctggaaacatgctcaaaatgccactggcttttacatatctcttttttcattgctttgtggtaccttgtatctctgcttttttcagtgacgagctttctaaatggtaatctacatttgtgctgtatattttcttagtgactggcacacagcagatatttgttaaattgttaatttattttttaacccttgcaataaaaaagcaagggttttgtttctgctttactgaaactgtcatttacactgtcagatttttgtttgttttggtttttgttttagtttgaaaaaccaagcagctttgcctatctttattattggtttcttttttttttttttcttactacagtggtctttgaaaatctggaggctttggacttggacatacctggatttaaataatagccttgttgaacttgacatccagttactactctaaatattttaaaatatgtaactcatctttctttttagactgtaacgagggctgggattgaatctgggtagcaagtaaatttttgttcaatgaatgaatcaatatgtcaaagaaaattttgtttcattttactctgcagttaaaatttccatttttatatgtttccgttccactaagactcacttttccatccctcttccctttatccccaattattgttccacccccagctcagtgagaggagtcagagcatgcaatagaggaatgtggcagaaaggcatgactgtctccagcccacccaaatcttaatrtgagttctgtgctctcctttttgacctttgctctgcctcttcagccttctgcctgttggtgtgcttcagtgttttttgatccccaccatctcagatcattttatctcttctttcctgatatacctttgtttctgtctactcttggcatcctaaaagccagctttataggtctggatgtgaggtggacattcttttgcatgcatggaggaagagtgttttagttaggacttttgaggttatagagaacagaaatccatatctgattaaggtagaaggagaaactattgggaggattgagaggggaaggcaggaatgcagctagacttcaggaaccaaggactcagcttagttcttccctcttgtttcagtctggctttctctttgtggaaggaatcatggctgctggcaatcccgaaggcttacggttttaacacggagaaattctgtattttccctattgtacaaggtccaggaaagggtgagttggccctcacaytgacccagtgtgattcagtacccacccttggaccagtcaaataaccagggggcatgaggtcatattaaaactgttgggaaacygcagagcaccttccagagaaggataaggcagggtactagataaacagaggcatcctcttctaggagaaagagtgttacatttataaagagwccactgtattttaaagaagttcttactgaacctttacatttatcttgggagatgggtggtggtatcctcatccgtgaggtagttgcatcctcaccagtatactggttagggtatgtaagcttgtggcagttaagtgtccaggatcttgaaaactggcatgtctagaatttgaatctaagtctgttggactccaaagcctatgtactttctaatgtgttagttgtctaccataacattagtttaggcttatttctcattcaacagcatgtgctaagagccttgtatgttttatttctgtgtgtatgcttataaaggtgagtagaatgcattgcctttctaaccaaattttataggttggtatggtaacctgacataaatatgcataattaagcatattaagtacagaaagatattattatggaaatagggrgaaacaccaggagcttcagaaaggtttcacaaagaaaataacattgagtaggtatttgctaggtggataaaaggaggagggacgttattcttggcagagtggaatgttaagtgcagtggcacagaggtgagagcgtggagcatgtggggagtcacctatagttcaggactgtggaacaaagaggttgtgggaaaagtgaagagatgagaccagaaagggaatcaggggccagattatgatagcctttgtatcctggctgaagcatttgaacttcgttgtatcatcagtggaaaacagttaaaggatttctaaataagggacctacatgacccagttagtatttaagaaactctggctgaagtgtggacagtggattagagggagaaaagatagaaagtggggaaacctattagagaactttgcaagggcctgcacttgttcagagggactaaatttagaactgctaaggagataaaaagtataaaatataatgattagttaaatttgagagagccaagtcagtttaatattgagatttttctttctggaatcttcttcctcttcctgcattccacttctctcattcaccaggatttctacctagctaactgcttgcttgcttgcttgcttttttctttctttctctctctctctctctccctccctctccctctctccttctccctctccctctgtcacacatgcacacacacacacacattctcacactcacactgaagcactcattacttccctgtagtactcatcatccctggaatgactctctgtgtttgtcttactccctatattgtaaactctgtaaggacaggggtcttgtctgacatttttactgttgttcctaatacctagtagcacactgctggacatgtggaggttgttcattgaatgcgtaggacatgtggagtttcaaatgaagtggaacttctgagcaaaagtgcttagtatgtatatagataagattgaagactttggagctttctccatttagtgacaactgaagtcaaggagtagattgcccacatagaatacagagtggggaaagaactctgaagaatagcaacatcaacagctggtagtaacaaggttacatacagttaaggtctgcgagatgcagttggagggttaaaggaattaagacatgggaggagagatttaagaaggagggaggggagatatgaagtaagggagaaggaagcaagagaaggaagtgccagcaatgccagatgctgtagaaggtaacaaaagatarggatggaaaattctccattggcttttggcagctcagaaactgactgctttagtgaagagtttcattggatatgtagatctgtgtgtttcctagggcagctgtaacaaagtaccacaagcttaactgacttaaatttattgtctcacagttatggaggytagaattctgacagcagggtgtgcagagggccatgctctttcctaagactctaaggtaggatccttatctctttctagctttttggtgattgcaactcttagcattgcttggcttttaatatatcactccagtctctgcctctgtggttacatgtggttctccctgcatctctgtctaaactttcctcctcttagaaaacaccagttgttggattagggcccaccctaactccagaatgacttcattttaacttgattacatttgcaaaatccagtttccagataaggtcacatttgtaggtaccaaaaattaggacttgaacatgtgtctttttgagggacacaattcaacccgcaacagtcttgaacgtgaattgcagtgcattgacattagaaaaggaggcaaagaagacatcaagtataggcaactaaagaaatctatgtacaagaaggaaaaagtgagaaaaaggtggtagatggggggtggtgaggggacaccatgtagaaggaggttttgtgtgtttttagttgttacccttagtgttttaaagcttgtaaaactgcagatccaaggccccactgaagaactacaattacaggttataatttgcaaaaaaggcaaaatcagttrtcttgcaaatataagataaacacaccaaatattttgttcaactcattcattaatragggaatcagtaaaatgttaaaactgtccatagagtatttgagaagctaggtgtttataggcaatgttaggatatgatagctgcattagatggccaaaactgattaatggccaacaaagccttaaacttttacctataggttattttttcaactatagaraaattatgtgcatctttaccaaacaatctgtaagttaacatgtaaccaagactgcaacctttaatcagcattaaatagcaggtggtaattattttgccctataactttgagtggcttttgctttttatgacatttaaaggatgtgctgcacactttttttttaccstatttccaagtttcaggtcatctttctgacatacttgttagaatccagggaggtggaaataggagcctgagaacctttaattagcctgtaagtgattctaacattgacttgactttgagtaccaccaaataagagaaaactgagaggctttgagtgcccatctgaggctggaacccattactatctgatgacactcatctcctgggttttgtgagttttttctctttctatagtgctcaactctttgacaaagagaaattatttaatgatctagggtggagcttttgccaggcagatatatgctcaagaagaatacagtggctagaaagcgaagatatcagaaagagtgtagttaatgtattggacgtgaggcccagactaggtagagaaagaagtgaggccaggatcagcttaacagatggagagagaagagagaaatccagttcacagaaagtatgcagtgggtgtaagagagctgagaggtcaggagactgtaaccagaagagcgagatgttaaagtttttaagatttcagagttgggagtagtttccaataatggcaaaaataaagtccaggttgtggtcctgagagtgagttactgaactgcagtagaggtcattgggttgattagtgagcattactttctcataaatttatactttctacaagacactagaagctttaaagcatgctataaatttaaatttcctaaaataatgtgccattgttctcttaactttcgccagattgtagccaagtgtactgggtcaataaacaatgggcaaaagctgttctgatcttttatgacaataatrgtactcacaaatatttattgagcacattgttatggcttaggaccttgacaccagttgttttcgtatggtatgtcgtttaaatcttaaccttggtagcttgaattgttaatattcccattttacccctggcaaaactgtgatttagcagcaataagtaaccttttcaaggtcatagtgagtggtagataggacatttaaattgattgtatgactccagtgtgtataaccattgcattctaggtagagtatgtgcatggtggagttgaagaggatttatatatagctcacattccttcatgttattcagttttgtagattatcacacatgcagagatgagtttgagcttaaaaagaatgaagctgggggcaatgtctttttaaaaaaatggtcacattgaccctctttggactctgaatgcatgtgcatcttatgcagtattttaaaaattaaataaatgagctatcaagccacaaaaaaccatggaggaaatttaaatacattctactaaatgaaagcagccaatccgaaaaggctaccaactatgtgattccaactgtttgatgctctggaaaaggcaaaactagggagacccgaaaaagatcagtggttaccagggttttgggggaggtagagatgagcaggtggaacatgggatttttagggcagtgaaactactctgtgtgatactatagtggtgggtacatgtcatatatttgtccagacctatagaatgtacaccaggagtgaaccctaatatgaactgtggactcagggtgataacaatgtgtcagtgtaggttcatcaattgtaacaaatgtatcagtttagtcaggaatgttaataatgaaggaggctatgcaagtgtaggggcaagggatatatgacaaatatctgttctttctattcagttttattatgaacctaaaactgctttaaaaagtgaaatatattttaaatactaaatttatgttatatatgttttaccacaatttaaaaactgtagggatggagaaagatataccttgtgaacactaaagaagactggagtcactgtattaatttcagacaaaacttcagaacaaggaaaattaccagggctaaagaggacattaaaaaattaagtgaaattagagtagtatttgaattatctgagatttgtagtgatgcaacttaacaaacctcacaattacaaggttgatatagtacttctggtctaaaaattcacagtaccaaataataaaaactttattgtaaccaaatgaaatcagatacgttagttaacagttgcaacttactcttctgaacacttttctgtttcgtaaaagctccatgctttctcattttaagatctcgcagatrtattatgtgaccaaagtgacagttatttagagcaagtatagtcagactcaccagttcaccaaaaaaaaaccttgaaaactcactggaaaagtttaaacctttgctctccatttttggcatatttgtgcaagtgtatcctgcatttgctgttaaaggaaataattttggaaatcacaatgttcatattattaaaattcagtaatgcatatataagaatataattaatacaatttatcagtagtgatatggctaaaatctgggggtggctggaaagtcatatggaatcagcatcacaagcacatacttaaacaaaaaacacacttgatttggagtttaattagagtagcctaaaaaagcatgcattctttgttgcaataattcattrtcatttaaatacgtttaattttctttctcttttttctagggataagtagtaaaaaaaaaaaaaaaagggggggkkttttcctgtaataatatcaaaatttgtatctggcttaacacatctgaccttacactcttcagaggaagtgaacacatgttctatgagtaattccctagataaatgtgcagycaaagaatcattaagatcaaattccagtgtttattcttagctgaaataaaattaaaattcaaaaattaggttaacaggcttctaccctttttgatcagttatagtctggtggagaacatgtcgaggaggaagatgaaaaagagaacctgtcagtgatagtgctgatggagtttggagaaggagaaagttagtgaagttggagttggtgagaatgtatggattggtgctctgaatgttgttttttccaagagtagttttactctttttgtcaattctgccttatgagcaggaataatagtaggtggtgtagcctggtcacagatcattattcttcccagtgtacaaagctactcagaattaatagcagtcacagatgattactgttagctcctttccctcctaatgttaagagctcctgacccagaaaaaatatatatcatttgaggtctgtagactaataaaaagcatttctttatgttaaagaaaaataaaacattccttttactttttttaaaaattggaaagtyggaacataaaactcttyagtataactgctgatctttgggggaaaaccagtctcttagtgaatagaacagcattaccctttgggccaaatggaacccagccaagagctaaaccagatcttttttctgagattttctagctttaactctaagtcagcacttaacctcagcactattcacttttaargttgatcattctttgttctgagggacctcctgtgcatgataagatgttttagcagcttttctggcctttacctactagatgccaataacacccctccccctccagttgtgacaaccaaaattgtctcaagacactgccaaatgggaggtaaaattgcttctgtggggtcctcttctcctctgccctgcaacccaccttttgagaatcactgctctaagtgtattacataattggttgatcaagaatgttttcccaattttagttctacttttaaatattttgtcgtattttaagtatcttggtggaataggctttacttttaagaactgtaaaaataaactggaaacacatttctaatttaggggtgaaaatgagaacgaggtctttccttgatttgcaaattcaatgttaagacctttgcatacctagcacagtgtttttcagattgcagttggggacacattagggggtcatgaaatactttagtgggtcatgagcgtgcatgcgagagtgtatagggtcacgatgtaaacggtatttcttttggaataagcaaaaaaaatatgtatatgtctagccttcccttttgaactggagtattctgaacatatatttcatagcagtaggtgcttagttaagctatttatccagtcaggttaaacttgtcaaataytttttgagatacaaagcattcaaatttgttcattgctgtagattggagacctgttgttaactttagtttctggtgcatatcatcttgcttgcaagaggaggaagctctgaactccatcacatattttagaacattcttggcacgttacttgtggactgttcctgycctccycctacacaaggttatgaaaaaagacaactctgtaattattttcttcatcagcatgcatgcaaaagtcctgtttttcatcagttagtatttcttttgttaacttttgtagaaattatccttcatgttggaaagggcagtaaatgttcgtgtatttattgagaatcaaacatgagcataagacacctaaaaattactcctaacactctgcgtgtactctttgtaaaaatcatttttaaatgacaaccgtaagttgaataatagcctacagggaataccttaagtgtgacaatctgccactacaaagtcgtagattcagctgttaatagaaaatacttgagtttctgaaattcatctacactttcaatcaccttaaaagctgcctttgttttctatttactaaagaacgtgcatttatattttgagttactttgtttattcagtggttattttatgaagattgaaccacctacaggaagaatgttttcatcttttcagtagtaagggcatttcagactagttttataatgttaggaactctgtcttagggtggtagttttttcctctgaggaaaaatgttagtgattgtttaagagttatttatcttacaattcatttattttcacagtagatttttttatatccctatgtttttaatttagctgatatccagcagagatattcaaggtattttcatgccagtttcaggggaaatttgtggttttttttttttatggactgtgtaacatcctacattttatatttgcaaaagaccagtggatatattgcacagaaatccacgtttattacattctgcccttatatatttttgtgttactgagttgctatgcctagttcttgtgtatgaaatgaaagcaagtatagaagatagctaaaatttaatgttgattaaaaactaagctttgtgtgagagatacttgttcagaaagccagatttctagtactgacctttaaaagtagactaaggagcaatactaatatggattcaacaataaaatttctttatcagccaaggatacgatttttaagtattatcataagaatttaggtacaaagttgttccatcattaaagttagctttgagactaatttgaaattactttttcatagattaatgtacagtttccttattcaattaataaacatttatttagcatccaccacttactaaaaactacrtgaarttcttattcataggcttttgaaagttttcatcttttctagcaaatattagcactacatttgttcttaaaaataatcaacatagtagaaagttctattacagccctctgtgtccatattgagtttagaactcagcagtgtcacttttaatatagtttttgtgtaagtgctgtactgttccaaaaggtgatttrtaaataactgttttgaaggacaaaatgctgttattttaaaagcatatattcatcatcctactagaaagagatttatttgaatcttattgttatggaatgctgaacagtacagttggagcagctgctgaaactcctaaatgaacattaatttttccttctgggtgctcagtaaaaacaaaatacaaactttatgataaagaatgcaaatatttcatttttacaaacatgttgttaactaagtttctgtatttagctgctgaataaatttctggagcaaataatgctgctgccaatatataaaggtcattttttcaaatctttaattttacttctccttattctatagggaaaaaataaggtgtgcgggaggaactactaaaaagttaaatttcagtaaatatagaattaaacttcattaaatattgctttaataatttcaagaaggagtgccttgtagtctgtaatagtcagtaatctgcataatctttcgtacatagtgtttttagaaatattcagcttctcgacatttatgcagccaacaaacatatgaaaaaaatgctcatcatcactggtcattagagaatgcagatcaaaaccacaatgagatactatctcatggccagttagaatggtaatcattaaaaagtcaggaaacaacagatgctggagaggatgtggagaaataggaatgctgttayactgttggtgggagtgtaaattagttcaaccattgtggaagacagtgtggcgattcctcaaggatctagaactagaaataccatttgacccagccatcccattactgggcatatacccaaaggatcataaatcatgctactataaaaacacatgcacacatatgtttattgcggcactattcacaatagcaaagacttggaactaacccaagtgttcatcagtaatagactgsataaagaaaatgtggcacatatacaccatggaatactatgcagccataaaaaaggatgagttcatgtcctttgcagggacatggatgaagctggaaaccatcattctcagcaaattaccacaaggacagaaaaccaaacaccacatgttctcactcataagtgggggttgaacaatgagaacacacgtacacagggaagggagtatcacacactggggcctgtcagaggctgggaggctggggaagggatagcattaggagaaatacctaatgtagatgatgggttgatgggcacagcaaaccaacatggcacatgtatatctgtgtaacctgcgcattgtgcacatgtaccccagaacttgtataatttttaaaaagttaaaaaaaaaagagcttccattcagcttctcacagatattttggttcatgatttgtaaatagatgaagctgaccacatttctatattttacattcactttttgaacaattaagttgctcttcttttgaagattggatttattataacatgtatatgtatatttaatgactactaatttatatttacttttatttgttcagaattgaaatctccttgaacttataaattatataagtaaccattgattattttgacytaacttgtcttctcttgcctcctgtgaatagatatactaagaacaatgtcaggtcttgtgatttgttaaaggatacaaagttacagctagataggaggaatctaccactgcaggatggctatagttaacaaaattatgtagtttcaggtaacacaagtgataaatgtttgagatgatgcatttgctaattgccctgatctgatcactatacatcatatgtatcagaacatcactgtgaaccccatgagtatgtacaattatttgtccattaaaaaaaataaaatagaaagtatgggtggtataaaatatttgatgtcgtgcatatttttaaatcttcacaaaaaaatcattatagaggaagtaaaatatgtgagaataatttatcattcttttcactttttttaaaggtgatggatgtggacacactgtactaggccctgagagtggaacccttacatccataaactacccacagacctatcccaacagcactgtttgtgaatgggagatccgtgtaaagatgggagagagagttcgcatcaaatttggtgactttgacattgaagattctgattcttgtcactttaattacttgagaatttataatggaattggagtcagcagaactgaaatrggtaggacttttttttgtaaatgtacatgtaaatacatcattgtctcaatgatgtatttttttgatattaacattaaataaccatgcagtgtaaggtgctatgtgggaaattattgaatatgtgtaaaaattttgaatttgaatcttttgggaagagaagattcttgtctgtttactttatttacttttctaataagcacatattggtacccttgcccaagatgccactgtactactaagaaggaggaagttaattctctgtttttttttttttgtttttttttttgagacagagtcttgcttttgtagcccaggctggagggcaatggcgcaattttggctcactgcaacctccgcctcctgggttcaagctatcctcctgcctcggcctcccaagtacctgattacaggcgctcgccaccatagccggctaatttttttttgatttttagtagagacggtttcaccatggtggccaggctgttggccaggctggtctcaaactccagcctcaggtgatccacccacctcagcctcccaaagtgctgggattacaggcgtaaaccactgcacccagccaattatctcatttttaaaaatgttttcctttcatagttttatttgcaattgaagaatacaagtataattaatgcttaggagacagtatagcatggtgattaaaaacaagggttttggatccaaacttcctgggattaaagcataactctcatcagcttgctgtgtgactttggccagattacctgacctctccattttttctcttgtaaaaaatacagggaatgaactagtatgtgyaacrtgcttagaaaagtaaacagcacctaagatataatatatgcttagtaaatggtagtggccattgttgttgttcttgattaagagcagtggttctcaattatagctgcatattagagccacctaagtagtaaacaataccataaacccagttaccatcctagaccagttgaatcagaattgattaggtggaacccaggcctcagtatcttaaacgcttcctgggaaaatctcttgcagtcacgtttaaaaacctttgatttaggcatcagtacctttcttaagcaagaaaggtggaaaaatttgtaaggctttttaggtgaactaacattataaaattaggaattctctgtgagtttatttagaaacattttttggttccagtgtgtaaaatatccttcagaactataataggaatccaatatactgttctttaaataccatactatgttcatcctctggcttcctctccatctctagtgaaatccttcatctcttctttacttttttggcctcttatctaccagaggaaaaattcctgccctatctcccaggctgctgattgataaactttggtgcttctcagtcacttcttgattaacctggtggtttgagcaccacgtgcgtattgcatgaatatatggtgttgaacaaagttttaggaacacaaatcgcctgaggatgtagaaaaacttactgtgatattaacactaatagaagataactggatagtagatgtctcctgcagatgcagtagggagcagacagtaccacctgagcattctttaagcaacagtgaggaaaagtgaaccacagtttggtcacccctctaacactttacaggagataagggagatagagaaatacattctactgagtgtaaggactaaattaaggatatgagaaattctgtagaacaaacgacctagtttcttcaacatatacatagcattttaaaaaaataggaggagggggaaggtaactgttctacattgtgacatatcttcctaaaataatatgtagactttgcttggatcttgattcaagctaaccactgaaagaaattatttttaagattatcagaccgaggtgggcggatcacgaggtcaggtgatcgagaccatcctggctaacatggtgaaaccctgcctctactgaaaatacaaaaaaatgagccgggcgtggtggcgggcgcctgtagtcccagctacttgggaggctgagggaggagaatggcgtgaacccgggagacggagcttgcagtgagccgagatcgagccactgcactccagcctgggtgacagagcaagactccgtctcaaaaaaagaaaaaaagattatcagagaaatttgaagcattgggcattcagtgatggtaaagaatgactgttttagatgtaataatgttaaaattatttttaagttctaatttgttagagacattctcaagttcaaatgtctaggatttatgtttaagtatttcagaaatagggagaaggataggagaaacaagggcacattagtgaagctgagtaatgggcagatgggaattgttacaccctcttctttctacttttgtgtaattttgaaaattcctataaagaaaagtggttatgttaaaataaaacaagagaatyatatatttagataatacatagtggcactgttggtagagtggaagagtggcgtggggaagattctgagcacaggtttcaaattgctcgctgaattctagtcaaagctccaggagttacttgttgagagtcctttttctacaaagtgttgaacctgcccagacttcatagtcactttctgtacggtctgaagattaaaagaagtaatactttgcagtgtttggtgtgtaataggtatttaataaatctcagctttcccttatttccattgctttttcctattctcctcatgggtgaatggaaagctgcagaaaggtcaaggggcctgagtgatgatggttcctgttgggcttcagtttgtacccacccttcccccatcacacctaccgtatacccactggtcctccatttggtagcagcctatggttagtggtagaaaagtttcttaacgtattgcagagaaataaagataattcaagaatagtcrtttaacattctggttaagataggtctgcagagaattacaggatagaaacaaatacattgtgggcatcaggatttcagggataatgtcactgaatctttttttttccccctatatcatgttttctcagtgcccctttagaaaacaagcattaaaggagaagagagttcattggtctctctgtgtttctgatgttcacatttgaagtatatgggctaatgatttcgtgggatgtgtgtctgatgcttcctcattattagattccagtgacagacttttggcaagaataycacagatgcgctgttctcagtgtatcatatcatggcacatgagattgatttgtcccatttctggtgctattaactttgatattttggctaaggtgatgtctctcagttttctacactgtaactatgctgctcttcataaccaatacatgtctgattgggagactctttgaaatgttggaaatatcctgttactcatcaaacttatacccactagatttgggacatattaatcttgtatgaatcaattattattttctaatttcattattccttctgtatttattaggtttttttttcatactaaaaacaggatctttcccttctctcccatttgtttgtttatatcagtgtgaagtcaatggattcctgtgttaggccatcacttatcaccctttcctgtcattattttggtgctcagattgtcccaaatctccagtgggagcctcttcacgctagctcctatgtcctttggtgatgtcctcatcattatttgagtacytctttatattctggcacaggatattctaggtttatcttgtgattgccctgytccagccctggaatcagccatttcttcagggaaccctggttctttttagtggagaatggtattagaaatcaatgtctggttgctaggtttagaccaatgagctaccatatgcctatcaacaaatagatttagtaaatagacatttgtatatacatatgtatatacatgtacctgtgttatatctttttatatttatctgcctgtattaaagagcatgagtttatgctgatacctttaatactaatgcaacattatagggttcattctatccttttcctatttttctttctaactcacttctctgacagtgagaaatcttgctcccattacctgtaatgtatttacttgttcagtgctataaccagaaaatagttttagaattgctaacccatgactcgaactgaaagaagcctgctacctagaattcgtacctgaggacttagagtctaaatactacattaaaaaattctttaggctggttcttactccaccaccacctgcccttcaatgtggttatgttactcatttgaaatatggtttggttcatttctttctgttcatcttccattataggttttttctttatccttgttggttttctttctcttttgttgaatatgttaaacattaacatgattctcaaagttaaaactgtacaaaaaggtagataagtgacattcctcccctttacagtgcatttcttctttccttttaaccccatctccactcactccctgtagctaaccaattgcattagtgtttgttttatcttttccgtacttctttatacaaatgacatttatattttctgttttctcctttcttatacgaactttaacattctttcaatattcttttgtactttgctttctccctacctatcagtgttttctggaaatcacygtgcatcattttgtaggatagtcctcattctttttatagcagtatagaactccatcatgtggatgtatcatagtttatttaatcactcttttatgaatggttgtattggttgctttcaatattttacagttacaaactatttttgtattcttagaggtgtctttggtgtagattcctgaagtgattgctgagtcaaaaggtaaattatatactttgttagacattgctaaattggaagttataccagtttgcatttccatagcataaaaatgcttgttttccacagccttcccaacaaagtgtgttgtcatatcttttaagttttgccaattgataatgataaatagtgctcagtatagttgtaatttgcatttctcttactatgagtgaaattgaactgttttttcccatatgttgacggccttttttttttttttttttttttactttttatctcttcctgtcttttgcccgtttttctgtcaagtttttttttatttttaaagacaggtctttctatattgctcaggctggcctcaaacccctgggctcaagcaatcatctcacctcagccccctgagtagctgggacgacaggcacacaccatttgcccatctgtcaagttttattggtctttgtttctctcaggttttaggacttctcattatcttttagggatattagtctataaacataatagtggtatatgctacaaataatttctcctaatttgtcagttgtcttttgactttgtttatgttactttttttcaaccatgcaaacttttaaaaatgtatttatagttagattcattagtctttttttaaattgcatctagattctaagtcctagttagaaagcttcttcctatatcccaactaaagataaatttacccatttttttcatagtgggattatatgatttcattttttatatttagatccctggtacatcggggtttttttcttttgtatggcatgaagtatagatctcattgtgttttccatatgactaaccacttgccccatcaccatgcatttaaaagtttatctttgtcccagtggtttgaaatactgcctttatcatatactgcagttctgtatgtgcttgggtctatttctggactttgggttgcactccacagatgtatctatccacataccagaatgtgactgttttgtaaaggctttcagaggctttayggtatgtgttaatgcctgatagggcttagtctcctttcagaaacgttcatttttagtgttttcctgggtcttccttcctgtttgtttatccatgtgaagtttagtatcagcttatctaactccacaaaaaagctcgttggtgtttttattgacattatrctgtttataaattaactttatgatgttgagttatcttaagttcaaaaccaagagctctttttttttctcctttcttcacatctacttttgttgtctttaaggattgttttaaactctttctcatgtagggtttacacattttttgttaaacttaatccttaacatcttatctgctttgttgcaatggagatggaggtgtttttgttttgctgttatatcctgtaacgggttcctaattatgtgagattgtatttctgtatgttgatttttttctgctattttactgagtttttaaaattatttcagttagttttatcattcactttctagggattttcagatacacaatcacatctgcagatagagatagttctacttcctttttttccatttcttatgcctatggttgattcttttatctaattgtattggctaacacctccagtccaggactacgttaaacagtagtggagagagtgagcatcctttccgggttccttatcttagtggaaatttaaagtgtctgagctcaggttgccgtaacaaaatctatagaccgagtggcttaaaaaaacagcagtttactttctcagagttttggaggctagaagtcccacatcaagatgccaagcaattcagtttctggtgagggctctcttcctggcttgtagatggccaccttcttcctgtgtcctcacatgacgaggttggagggatgaggagagagaaacagcaggttctcttatgtctcttcttataagtacactaatcctgttggatcagcrccccaccttaggaaaactaaaaccatttaattttaattacctctctaaagagcctaactccaactctagtcatattaagagttgggacttcaacagcaattaattttggggggcgtaccagtatctggtccataataggaagtatccactgatttccattaagtgttgttatcaagaaagactattgaattttgttgaaaagcttttttagcatctatggaggtaatgatatggtttttctacctaaatctattggtatagtgtattatattaatgggttccctaatattgaaataactgtgcattgttggaataagtatctcttggttatgatgtgacattcttttaatgtggcattggattatgtttcctaatattttattagtatttttgcataaatattggtgtgatattaatttgtaatttactttgcattttctttatcaggcttaggtattgatactatacatacaaataaaaagaaatatgaagttttcctttctttttagttctctggaaaaatttacagagaatttgaacaatctagtttttgaaggtttcactctgtgaagctattttagcctggtgcgtttttgataggatgcttccttaatgacgttctctgtttcttctcaggaaattggtctgtttgagctttctacctctaatgggtccaattgtaataaacggtacttgcctggtaaattacccattcacctaggtgatctaatatattggccatgatgtctgtaaaatagaatcttacagttattaacatggttatttcagtgtttttccaatagttatttacctcctgtcatttcttattttacatatttatgcttcccaccctcttttttcattaaattagctaggggcatgcctattctgttaaatttttccaaaaaatgaatcttgatttattagaactattgtttttctgttgtctacattattaatctctattttcatgatttaaaattttttttttactttgttaactgctagttttagctaggcatttaattcactttttctttcatttttattgataaaaatatctaagcctatgaattttactttgatcacatccttaagaatgatatcactgattaatatgggtcaattatatcattttttaggaatttttaaactttggtttatgtttttcttttacccaataattgtttaacaggtttatttctaattggaaggacctttctttgttattgctaataatgtataattctattgcattatagtcagagagcattgtaaaatttctactttataagctaatgtatgaccagtttttttgtgaatattctatatatacttgagaaggtttactctctactgtaaaaagtttgatatgcatttaaaaatctgtctttattttgctgtttctgtcttctatatacttattttatctgtttgatctcctatttggtgtggttctttctctttctttgctgtctcctggaggttttgcttttataaagttgctgtgctgtgtcgactagatattcataattctaatatctccattttaaattatgacttctcacatttaaaggtttcctacccatcatatattactttttagtttgaattctcctttgtttgacaccagtatcacacacataccctcctattaattccttattgttttcattatcctgctgtgtctgtctgtgcccatcactttatttttagcctttctgaatcactttgttttgggtgtctttcttgaatattgcatatttttgggtctttatgagccaaattgcaaatatttttaatgtctaagttaaatccatttgcatttatttataactgatacattttaactcttccatatctttcaaagttatgtatattatatttgttgtgttcattttttctacattgttttctgtccttctggttttttttaagtgtcttttcgtgtttggtaaggtttatagttttgttctaggtgctgcttttcaatttatactttttaaaatgcctgtggtccctattgtcttaatcatttactatccgatttgtccatttttaatggtattctttattttctacctattgcctataaaacattcaatgaactagacttctttccccttccttctgtacccagtttcctcagttttattctgtttagtgtggctacgacagaataactgaagctggatgttttataaagaaaagaggtttatttggttcataattctggtggctggaaagtgcaagagtggacagctcatctgataaaggttttgtgctgcttcaactcatggaggaaactggaagggaaaggggcttgtgcagagagagaggggaccgaggaggctgacttgctttataacaacccactgtcatggtaactaatccagtcctgttagagtgagaactcactcccgtgagatggcattaatcaatttataagagatctggccccatgacccaaacaactcccattaggccccactttccaatactgtcatgctggcagttaaacttcaacatgaagactatactttcagagatcacttctgtagtttattattagaaagtttctctgaatgtgtagaacactggaaaaaatgatctaagactactgtgaatatgtstgtgcacacaaactagaaagtctagaggaaatggataaattcctagaaacacacaatcccacaaatttgaatcaggaagaaacagaaatcctgaatggaccaagtaataagtagtgagattgaatcagtaataaaaaatctcccaaygacaacaacaacaacaacgaatgcccaggaccagatggattcacagctgaattttaccagacatggaaagaagaactgatgccaattctactgaaactattctaaaagatggagaaagagggaatcctccctaattctttctatgaacccagtatcaccctaataccaaagccaggaaaagacacaacaaacaaggaaaactgcagaccaatattcctaatgaacataggtgcaaaaatcctcaacaaaattctagcaaaccagattcagcagtatatcaacaagataattcagcatcaagtgggtttcataccaggaatgcaaggatgatttgacatatgcaaatcaacaaatgtgattcaccacataaatataattaaaaacaaaaaaaaatcatttcagtagatgaagaaaaagcatttgataaaattgagcatcccttcatgataaaactcctcaacaaactaggcacagaaagaacataccttaaaataataaaagccatatatgacaaactcacagccaacatactgaatgaggaaaaactgaaagcattcttcctaagaactggaacaagacaagaatgcccacttctgccacttttattcaacgtagtactggaagttctagctagaacagtcaggcaagagaagaaataaagggcatctaagttagaaaagagaaatcaagctatctctgtttgctgatgatgtgatcttataccttgaaaattctaaagactcctccaaaatctcctagattggataaatgaatctgtaaagtgtcaggttacaaaatcaccatacacacatcagtactactgctatataccaataatgaccaagcagaatcaaatcaagaactcagtcccatttacaattgttgcaaaaaaaggaaaaaaaaaaaccctaggaatatacttaaccaaagaggtgaaagatctctacacatagaactgcaaaacactgatgaaagaaaccatagatgatacaaacaaatagaaaacctcctatgttcatgaattaaaagaatcaatattgtgaaaatgaccatactgcccaaaacaatctacagattcagtagagttcctatcaaaataccaccaatgcctgcctacctttctttctttctttctttctttctttctttctttctttctttctttctttctttctttctttctttctttctttttctttcttttcttttcctttttctttctttttttctctctctttttctttctctatttctctctctctctctckctctctttctctatctcttcttccttccatttccctttccctttccctttcctttccatcttactctgtcacccagtctggagtgcagttgtgcaatcttggcttacttcagcctcagcctcctgccttagcctcccaagcagctggaactacaggtgtgtgccatcatatcctgccaaaaacaccatttttctcagaattagaaaagaaaatcctaaattcaaataaaaccaaaaatcctgaatagcaaaagcagtcctgagcaaacaaaagaaatctgggggcatcacattagctatctttaagttatactgcaaggctacagtaatcaacacagtatgacaactggtataaaaatagacacatataccaatgaaacagaatagagaacccagatataaagccaaataactacaaccaactgatctttgacaaagcagactgaaacatacaatgggggaaaggacacmctattcattcagtggtgctggaaaattggatagccatacacagaagaatgaaactggttccctatctctcaccgtctacaaaaatttactcaagatggattaaagacttaaccctttccccatttgctctgagaatactcgccagtggcacttgcggctgcatcatttaccccaaagtaaatttgccacaaaatagcaccctatgattattatktttgcattgctctagtatatcaactttggaaacaaaagacattatcctatttatagcactccatttttagtagcggtatttccacttacaaaataaaatctcarccactgaaaatgtcaaatcttagaaaacagcattcctacacatgatgctaacattgttcatgaaaagttgttggccaaggattagtttcatgaattcagtttttctgaaatagattattctgatgattcagacaattctaatgttagttctgttyagaaataactccaagaacagtttttatattttattttcacaytgactatcagtcagatttgcttcagcctcaaagaacgtgtttatgtaaaattaaatgagcgctggcagcaagccacacctttttttgaaaacaggaaaagggtcaaatgtaagacctgaaaccataacaattttagaagaagccctaggaaaaattctggatattggcgtaggcagagaatttattagtaagagacagagcaaatgcaacaaaaataaataaatgggactcaaactgaaaagctttgtacagcaaaagagataatctgcagagtaaacagagaacctacagaatgggagaaaatatttgtaaactatacatctgacaaaggactaatgtccgtaatctacaaggaactgaaattagcaagaaaataaataatcccttaaaaagtagacaaacaacatgaacagacatttctcaaaagaagatacacaaaagactaacaaacatatgaaaaatgctcaacatcactagtcatcacagaaatgcaaattaaaactgcagtaagataccactttgccctagtcagaatggccattaaraagtcaaaaaacaatagatgttggcgcagacagggaacacttatacactgttggtgagaatgtaaattagttcaacctctgtggaaaacagtatggaaatttatcaaagaactaacagatctaccattcagttcagcagtctcactactgatatctgcccaaaggaaaatatgtcattatatcaaaaagatacctgcactagtatgtttatcatagtagaattcaccatggaaaagatacggaatcaacctaagagtccatcaaaccaatgagtggataaagaaaatgttatatatatatgatgtaaacatatakacacagtggaatactactcacccttaaaaagaatgaaataatgtcttcgcagctccttggatagaactggggatcattatcctaagtaaagtaactcargaacagaaaaccaagtaccatatgttctcacaaggggggactaaccttgtggataaataacagcatacagaatgctgtaatggacatcggagactcagaaagggggagggtggtaagggattaaaaaatcacctgttgggtacactgtacactatttgggtgatgggtacactaaaagctcagatttcaccactataaaatttatctgtgtaacaaaaactacttgtacccctaaagctattgaaaattaaaaaaatatataaataaatttcaacatgagatttcatggggacaaaccatgtccaaatcatagcactctcagaatatacattcataacacacagcatgtatcatatcttcttattcttcaaccccatctctaacttttctagatctataattaaatataataaatgatcactgtctttttcctcaagtcctcccactagtctattgtttggatgaagttcatctttgaataggttgattccttaagragggcttatgttgcagattttgcatgtttaaaactgcttactttgtaaattttttatggcctttaggcttcagggggctgcttgatagtatttaaatyttggattcaaatgttatttctggtcgggcacggtggctcacgcctgtaatcccagaactttgggaggytgaggtgggcagatcacgaggtcaggagatcgagaccatcctggctaacaaggtgaaaccccgtctctactgaaaatacaaaaaaagtagccgggcgcggtggcaggcacctgtagtcccagctatgcaggaggctgaggcaggagaatggcatgaacctgggaggcggagcttgcagtgaaccaagattgtgccactgcactccagcctgggtgacagagcgagactccgtctcaaaaaaaaaaaaacaaaaaacaacaaaaacaaatgttatttctttgagttaaaaaaaatgcttttccatgattcccttacttcatattgttttttgagaagtctgatgacaattgaactctcctgccattataaggtatttggtttttgtacagtgaccatgaggatttttttctttacctttaaagtctattagttttctaaggatatgtgttgaagttgatcattacaggttttcactggtacccagtggaccctttcagtatgtaaattcaagtcttcctttatttctagaaaattgtcttggattatagttttaatacttcttatttaatgattttttaagtgacatgaaarttgtacwtattttataaaatacctaggaatccaacttacaagggctgtgaaggacctcttcaaggagaactacaaaccactgctcaatgaaataaaagaggacacaaatggaagaacattccatgctcatggataggaagaatcaatatcgtgaaaatggctatactgcccaaggtaatttatagattcaatgccatccccatcaagctaccaatgacttycttcacagaattggaaaaaactactttaaagttcatatggaaccaaaaaagagctggcattgccaagtcaatcctaagccaaaagaacaaagcgggaggcatcaggctacctgacttcaaactatactacaaggctacagtaaccaaaacagcatggtactgggaccaaaacagagatatagaccaatggaacagaacagagccctcagaaataataccacacatctacaaccatctgatctttgacaaacctgacaaaaacaagaaatggggaaaggattccctatttaataaatggttctgggaaaactggctagccatatgtaaaaagctgaaactggatcccttccttacaccttatgcaaaaactaattcaagatggattaaagacttaaatgttagacctaaaaccataaaaaccctagaagaaaacctaggcagtaccattcaggacataggcatgggcaaggacttcatgtctgaaacaccaaaagcaatggcaacaaaagccaaaattgacaaatgggatctaattaaactaaagagcttctgcacagcaaaagaaactaccatcagagtgaacaggcaacctacagaatgggagaaaatttttgcaatctactcatcagacaaagggctaatattgagaatctacaaagaactcaaacaaatttacaagaaaaaaacaaccccatcaacaagtgggcaaatgatatgaacagrcacttctcaaaagaagacatttatgcagccaaaagacacatgaaaaaatgctcatcatcactggccatcagagaaatgcaaatcaaaaccacaatgagataccatctsacaccagttagaatggtgatcattaaaaagtcaggaaataacaggtgctggagaggttgtggagaaataggaacacttttacactgttggtgggagtgtaaactagttcaaccaytgtggaagacagtgtggcgattcctcagggatctagaactagaaataccatttgacccagccatcccattactgggtatatacccaaaggattataaatcatgctgctataaagacacatgcacacgtctgtttattgcggcactattcacaatagcaaagacttggaaccaacccagatgtccatcaatgatagactggattaagaaaatgtggcacatatacaccatggaatactatgcagccataaaaaatgatgagttcatgtcctttgtaaggacatggatgaagctggaaaccatcattctcagcaaactatcacaaggacaaaaaaccgaacaccgcatgttctcactcataggtgggaattgaacaatgagaacagttggacacaggaaggggaacatcacacaccggtgcctgtcatggggtggggggagggaggagggatagcattaggagatatacctaatgtaaatgacgagttaatgggtgcagcacaccagcgtgtcacatgtatacatatgtcacctgcacgttgtgcacatgtaccctagaacttaaagtataatacaaaatatatatataaaaaaagaaaattgtatatatgctgtacattatgttttcatatgtgtatacattgtagaatgggtcaatcagactaataaatgcattacctcacgtacttaacgtttttgtggtgagaacacttaaaaaatctcttagcaatttttaactatacaatacactgttatacagtgtttctttttaacttatcactcctatgtaactgaaatttttgtgtcccttgaccaacatctctccagctcatccctccaactcccccttcaacccgttctactctctgcttctgtgagtttgtcttttttagattctacatgtgagtgggatcatgtagtatttgtctttctatgccttgcttatttcgcttaacatcatatcctccagtttcatccatgttgttagaaatgtcagggtttcttttttttttaatacaggctgaatagtactctgttgtgttcatataccacatttcctttatccattcatctactgatggacatttagattgattccatatcttggctattgtgaataatgcagcagtgaacatgggagtgtaggtatcttttcaacatactgatttcattttctttggatatgtatacccagtagtaaaattactggatcatatggtagttttatttttaattttttgaggaacttccatactggttttcataacagctatactaatttagattcccaccaatagtgtagaagtgtaccattttctccacattcttgtcaacacttttgtctttttgatagtagccattctaggaagcatgaggtgatatctcattgtggttttattttcatttccttggtgtttaacggtgcagaacattttttctttttttattattatttaagttctaggatacgtgtgcacagtgtgcaggttttttacatatgtatgcatgagccatgttggtgtgctgcacccattaactcgtcatttacattaggtatatctcctaatgctttctctcccccctccacccaccccacaacaggccccagagtgtgatgttcccctgcctgtgtccaagtgttctcattgttcaattcccacctatgagtgagaacatgcsctgtttggttttttgttcttgcgatagtttgctgagaatgatggtttccagcttcatccatgtccctacaaaggacatgaactcatctttttttatggttgcatagtattccatggtgtatatgtgccacattttcttaatctagtctatcattgatggacatttgggttggttccaagtctttgctattgtgaatagtgccacaataaacatacatgcgcatgtgcctttacagcaacatgatttataatcctttgggtatatacccagtaatgggatggctggatcaaatggtattttaagttctagatacttgaggaattgccacactgtcttctacaatggtttaacaagtttacagtcccaccaacaatttaaaagtgttcctatttctccacaacctctccagcacctgttatttcctgactttttaataatcaccattctaactggtgtgaggtggtatctcattgtggttttgatttgcatttctctgatggccagtgatgatgagcatttttttctgtgtcttttggctgcataaatgtcttcttttgagaagtgtctgttcatatcgttcgcccacttgttgatggggttgtttttttcttgtaaatttgtttgagttctttgtagattctcaatattagccctttgtcagatgagtagattgcaaaaattttctcccatcctgtaggttgcctgttcactctgatggtagtttcttttgctgtgcagaagctctttagtttaattagatcccatttgtcaattttggcttttgttgccattgcttttggtgttttagacatgaagtccatgcctatgtcctgaatggtattgcctaggttttcttctagggtttttatggtgttaggtctaacatttaagtctttaatccatcttgagttaatttttgtataaggtgtaaggaagggatccagtttcagctttctacatatggctagccagttttcccagcaccatttattaaatagggaatcctttccccatttcttgtttttgtcaggtttgtcaaagatcagatggttgtaaatgtatggtattatttctgagggctctgttctgttccattggtctatatctctgttttggtcccagtaccatgctgttttggttactgtagccttgtagtatagtttgaagtcaagtagcttgatgcctcccgctttgttcttttggcttaggattgtcttggcaatgcagcttttttttggttccatatgaactttaaagtagttttttccaattctgtgaagaaagtcattggtagcttgatggggatggcattgaatctataarttaccttgggcagtatggccattttcatgatattgattcttcctctccatgagcctggaatgttcttccaattgttgacctcttttgttgagcagtggtttgtagttctctttgaagaggtccttcacatcccttgtaagttggattcctagttattttattctctttgaagcaattgtgaatgggagttcactcatgatttggctctctgtttgtctgttattggtatataagaatgcctgtgatttttgtacattgattttgtatcctgagactttgctgaagttgcttatcagcttaagaagattttgggckkagatgatggggttttctaaatatacaatcatgtcatctgcaaacagggacaatttgacttcctcttttcctaactgaataccctttatttctttctcctgcctgattgccctggccagaacttccaatactatatgaaataggagtagtgagagagggcatccctgttttgcaccagttttcaaagggaatgcttccagtttttgcccattcagtgtgatattggctgtgggtttgtcataaataactcttattattttgagacacgtctcatcaatacatgatttattgagagtttttaggataaagggctgttgaattttgtcaaaccccttttctgcatctattgagataatcaatgtggtttttgtatttggttctgtttatatgctggattacgtttatggatttgcatatgttcaaccagccttgcatcccagagatgaagcccacttgatcgtggtggataaactttttgatgtgctgctggattcggtttgccagtattttattgaggatttttgcatcgatgttcatcagggatattggtctaaaattctctttttttgttgtgtctctgccaggctttggtatcaggatgatgctggcctcataaaaagagttagggaggattccctctttttctattgattggaatactttcagaaagaatggtaccagctcctccttgtacctctggtagaatttggctgtgaatctgtctggtcctggactttttttggttggtaggctattattgcctcaatttcagagcctgttattggtctgttcagggattcaacttcttcctggtttagtcttgggaggktgtgcatgtccaggaacttatccatttcttctagattttcttgtttatttgcgtagaggtgtttgtagtattctctgatggtagtttgtatctctgtgggatcggtggtgatatcccctttatcattttttattgcgtctatttgattcttctctcttttctttattagtcttgctagcaatctatcaattttgttgatcttttcaaaaaaccatctcctggattcattgattttttgaaggtttttttgtgtccctatctccttcagttcttctctgatcttagttatttcttgccttctgctagcttttgaatgtgtttgctcttgcttctctagttcttttaattgtgatgttagggtgtccattttagatctttcctgctttctcttgtgggcatttagtgcttaaatttccctctacacactgctttaaatgtgtcccagagattctggtatgttgtgtctttgttctcgttggtttcaaagaacatatttatttctgccttcatttcgttatgtacccagtagtcattcaggagcaggttgttcagtttccacgttgttgagcggttttgagtgagtttcttaatcctgagttctagtttgattgcactgtggtctgagagacagtttgttatgatttctgttcttttacatttgctgaggagtactttacttccaactatgtggtcaattttggaataagtgcaatgtggtgctgagaagaacgtatattstgttgatttggggtggagagttctgtagatgtgtgttaggtctgcttggtgcagagctaagttcaattcctggatatccctgttaactttctttctcattgatctgtctaatgctgacagtggggtgttaaaagtctcccattattattgtgtgggagtctaagtctccttgtagatctctaaggacttgctttatgaatstgggttctcctgtattggctgcatatrtatttaggatagttagctcttcttgttgaattgatccctttaccattatgtaatggccttctttgtctcttttaatctttgttggtttaaagtctgttttatcagagactaggattgcaacccctgcctttttgtgttttccatttgcttggtagatcttcctccatctccttattttgagcctatgtgtgtctctgcatgtgagatgggtctcctgaatacagcacactgatgagtctcgactctttatccaatttgccagtctatgtcttttaattggagcatttagcccatttacatttaaggttaatattgttatgtgtgaatttgatcctgtcattgtgatgttagctggttattttgcttgttagttgatgcagtttcttccaagcattgatggtctttacaatttgtcatgtttttgcagtggctggtattggttgttcctttccatgtttagtgcttcctttaggagctcttttagggcaggcctggtggtgacaaaatctgtcagcgtttgcttgtctgtaaagtattttatttctccttcacttatgaagcttagtttggctggatatgaaattccgggttgaaaattctttcctttaagaatgttgaatattggcccctactgtcttctggcttgtagagtttctcctgaaagatctgctgttagtctgatgggcttcccttsgtgggtaacccaacctttctctctggctgctctcatcattttttccttcatttcaactttggtgaatctgacaattatgtgtcaygaagttgctcttctcgaggagtatctttgtggcattctctgtatttcctgaatttgagtgttggcctgccttgctaggttggggaagttctcctggataatatcctgcagagtgttttccaacttggttccattctccccatcactttcaggtacaccaatcagacgtagatttggtcttttcacctagtcccatatttcttggaggctttgttcatttctttttagtcttttttctcyaaatttctcttctggcttcatttcattcatttgatcttctatcaccgataccctttcttccagttgattgaattatctactgaagcttgtgcattcgtcacgtagttctcatgccatggttttcagctccatcaggtcatttaaggacttctctacactggttattctagttagccattcgtctaatcttttctcaaggtttttagcttctttgtgttgtgttcaaacttcttcctttagctcagagaagtttgatggtctgaagccttcttctctcaactcgtcaaagtcattctccgtccagctttgttccgttgctggcgaggagctgcgttcctttgtggggggagaggtgctctgatttttagaattttcagattttctgctctgttttttccccatctttgtggttttatctacctttggtctttgatgttggtgacatacagatggggttttggtgtggatgtcctttctgtttgttaattttccttttaacagtcatagccctcagctgaggtctgttggagttttctggaggtccactccagaccctgtttgcctgggtatcagcagtggaggctgcagaacagtgaatattgctgaacagcaaatgttgctgcctgatcattcctctggaagcttcgtctcagaggcgtacccggccatgtgaggtatcagtctgcccctactggggggtgcctcccagttaggctacttgggggtcagggacccacttgaggaggcagtctgtctgttctcagatctcagactccatgctgggagaaccactactctcttcaaagctgtcagacagggacatttaagtctgtagaggtttttgctgacttttgtttggctatgccctgcccccagaggtggagtctacagaggcaggcaggcctccttgagctgcrttgggctccacccagttcgagcttcctggcckctttgtttacctactcaaccctcagcaatggtgggctcccctcccccagcctcctgctgccttgcagttcaatcccagactgctgtgctagcaatgagtgagcctccgttggcgtaggaccctccgagccaggcgtgggatgtaatctcctggtgtgccgtttgctrtaagaccattggaaaagtgyggtattagggcggaagtgacccgattttccaggtgccatctgtcaccccttcmcttggctaggaaagggaattccccgaccccacgcgcttcccaggtgaagcgatgccagtacctcagttggaaatgcagaaatcacccatcttctgcgtcgctcacactgggagctatagactggagctgttcctattcggccatcttggaacggaggacccagaacattttttcatatatctgttggctatttgtataataggggaggggattgttttcataaactttttctgaaaaatgcctacttaggtcttttttcatttttaaagttacttgttttcttgcttttgagttgtttgacctcatatgtttttggtattaaccccttaccagatacatggtttgcaggtattttctctttctgtgtctcttcactctgttgattgttttctttgctatgcgaaagcattttagtgtgaggtaatcctatatgcctattttttaatgttaatatttgttccattgctttgtgtatttatttttaatacttatgagaggtgacagcgtgctggcagccctcgcaggcctcgctcgctctcggcacctcctctgcctgggctcccactttggcagcacttgaggagcccttcagcctgctgctgcactgtgggagccccttcctgggctggccaaggccggagccggctccctcagcttgcgggtaggtgtggagggagaggcgcaggcgggaactggggctgcacacggcgcttgcgggccagtgcgagttctgggtgtgtgtgggctcggcaggccccacactcggagtggccagctggccctgccagccccaggcagtgaggtgcttagcacctgggccagcagctgctgtgacttttcgctgggccttagctgcctccccgtggggcagggctcgggacctgcagcccgccatgcctgagcctgccccccaccgtgggctgctgcgtggcccaagcctccccgacgagcaccgccccctgctccatggcacccagtcccattgaccacccaagggctgaggagtgcgggcgcacggcgcgggactggcaggcagctccacctgcagccccggtgcgggatccactgggtgcagccagctgggctcctgagtctggtggggacttggagaacctttatgtctagctaagggattgtaaatacaccagtcggcactctgtatctagctcaaggtttgtaaagacaccaatcagcaccctgtgtgtggctcagggtttgtgaatgcaccaatcgactgtatctagctactctagtggggacgtggagaacctttatgtctagctaagggattgtaaatacaccaatcggcactgtgtatctagctcaaggtttgtaaacacaccaatcagcaccctgcgtctagctcagggtttgtgaatgcaccaatcgacactctgtgtctagctaatctcgtggggatgtggagaacttttgtgtctagctcagggattgtaaaygcaccaatcagcaccctgtcataacggaccaataagctctctgtaaaatggaccagtcggctctctgtaaaatggactaatcagcagaatgtgggttgggccagataagagaataaaagcaggctgccggagccagcagtggcgagccagcagtggcaacccagcttgggtccccttacacactgtggaagctttgttctttcgctctttgcaataaatcttgctactgctcactctttgggtccacactgcctttatgagctgtaacactcaccgcaaaggtctgcagcttcactcctgaagccagcgagaccacgaacccaccaggaggaatgaacaactccagacgtgccgccttaagagctgtaacactcaccacgaaggtctgcagcttcactcctgagccagtgagaccacgaacccaccagaaggaagaaactccaaacacatccgaacatcagaaagaacaaactccggacatgccacctttaagaaccgtaacactcactgcgagggtctgcggcttcgttcttgaagtcagtgagaccaagaacccaccaattccggacacacttatatgtcagttgaatcttctttgccatttatatcccctttcatttcagccacattctcactgatcctttttactttttaaatattctttttagtctgttttttttcttcttttcaacattccttatgttttcgttagaatctgtaattccttgtgcactttataatgtcttaattcttcatttttggtatacttttgtctttttcttatatttctttcctgaggtcaaccaactctcatttctttctgctttttttgtccatttctgcccctagtttctgaatttatgcttcaagatgttttatcatatcccaaatgtatgaggacatttaattaactttggagtgttgtgctgtagtttccttctgtcactgtttttatagggggagagggttttcataaactaaattttagggattcccattttttgttttctttttatactgtgtatttttaagtagattaacattgtacctctgtatttctgtggatagggctggcagtttgcagtggtttataagctttgtagctcataataggcccctttgttaatatagttttttcttttttttcttctgagagagaccatagttcgggagagattgcatatatatttgttgttttgttttgttctttcagtatcctaaatgtttcctctgaggttttgaggcagattattgaggaattgacaactgtccatttctcagcatttaactggagggaacttactctcctgtgagatcctgcccccatccaagaattcctgtttgtgagccttttaagtgaatattaaaaggttttgacatctcctaagtagtgaagagtatattttttcagaaaagctttaaagaaatttcttgatattctatgaatgtctcatctgtgatgcttggcaccacatctggttttgctgaagtcttcacattattatgactcattgctttttgtattagcatacttggcatgagaaactgccagctatactgaaataatctgtcaacttagtaagagctaggaccttgaatcactaccttttcaagatgttttattaagaaatagaatgtgaagctctctttacagagttggcttgttttccaaaagataactcttaaagtcctttgctaaagtagaagtttcataagagagaaggaaagcccacttggaaaatttcgatggggaattttgatattaccttatgaatatttcagcccatctgaatgctataaatttttctatcaagaccgtttggttaccattgtagatagtggtaaaaacctatatgctcttttgtctgagctacagttctgaaaggattttagaggagggaactatgcttacagtcaaagaaatgcatagttttaaaactacatttttttcctgacttttgaattcataaaaaatattaaaattttaatgttatgtttgtgtgagtgtggtaaaactgacacttttttatgttgaagatgtacgtaagtacacatttctatacgtagaagaggaattgctgggtcactgggttgcatatgttcagctttagcagttattgccaaatgtttttgtggctgtactattttatacccaccaccagtgtataagagttctagttaccattctctgcttttctccatgttaactgttctggtgtgtgtgtactgatggcatgttatacatagtttgctttgtatttccttgatagctgatgatactgtgctcttttcatacatttattatccatttaaatatctttgtttataaaaaatctgtttacattttcatgcatattctctattgggagatctttttcttattcatttgttggagttctgtatatattcgggtaatgggttctttttagatgtagtaaatgtatcttctccattgctatgggctgccattttactcccttactggtatcttatgataaataaacgttaattttatgtagtttgcgtttactaattattttatggttagtactttttgtattctgtttaagaaatttttgcccagttctaggtcgtgaagctcttctcaaagttttccacttaaagccttattggatttgtttctaatattatcctcaatccatccagaattgatttttatctgtgttgtgtgaggtaggagtcaaagtgtcaaggtacatttttcccttgcagcgtttattcactttaaaatgtgcagatatcagatctgctgcttaagaagaatarcaccaaaatagccacttttctaaaatcaagatgtacaatgactatgatatgttgtagaaaaacataatttaaaatacttttctaaaaccactatattttagaaggagaggcaaattcatttttagtaatattgttaaatcccttttaaacctagtaaatatctgttatgtcccattttaaatatatacccaatagtctaattgttcaaaaagaaattagagctataccttcctatcattatcttctgcaggcaagtctttgctgaagcagctaaaagtaaggctaaatccagccaaaaggacagcttattcacagtataagagaaatgattatgggaagacattttagacattcaaaaagagaacactcaaccastccaagcagggggttaatttgtacatctccacctcactctggcccaccaagcataagacaatggtcctcaaagccagactttttaaagaaactactgatgggagttatttaatgatagcatctatggtaaacattgttcaggagctatcatggcctcttctgtaccttagaggattcaactgtacatttgatttgtcccactacactaagctttctgagggcatcactgcctctcattccattactgaatccccagttcctgcctggcttagtgcctggatattcagagtttcagtaaatgagttcctttgagaattccaaattttgtttttgagactagagatgctctatrctagttaaaaaaagaaaaaaaaaacytgttcgtaaataagtttgtaaattaggactgakgctctttaagcaagcttcatttccctccactgaaagtgggcagagctgatgtgcttttgttctagcaagtaactctctaccctctggttcatccttctaagttgcagattcctaaggagagcattgttccgtggcacacctcaggaagttgaatgagcttccatttaattgagaacataaataagatttctcaagtttygtaacaatattaattatacttctggtttatcagagtcagatgcactatctcccctcttttgaatacagaatgtttccatttaacaccttctagagcttaatttattgctgttattcatctactgtggttgatgtggacatcagaagaggcatggtgaccataaggtctctatactctgtacaagtggctacaagctcactgccaacagggtctagacagatgaaataaaggagtgaaatggcctaggcatatgaagaataacagcatagccrtgatgataaatgatagctgagcttcaggactggtggcattgtggagtgatagggctgtggcaaactggagtgtgactttctttttcaaaggggacagctgctacttaaggacaaccacttagaaaactggcctagatttccttttttccttgtgatttttcaagagaagttggaaattcagaatttatgttaagtttccagattttgagaactttaacacctaatttaaacatttttgaaggagagtatagcccagagctgtacagaccaagaggcctgtgggctaatttgggtcctgagccatcaattctaacttcgcctccatacctctatcaaattcaattatccaaaagcacaatattcttggactgtacactaaattcctggttgtattctgttttactttgcttcwtaataaattatcacaagcctacaacttaaaacagcgcagttttatcatctcacttcccatggatctgaagtctaggcattgcatggcatgactgaattctctgcttggggtcccaccaggctgaaattaaggtgttagctgggaatacgtttctcatctggggctcacagttctcttccaadtgtactagttgttggtagaattcagttcattgcagttgtaaaactgaggtccccattttcttggtaactgttggccagggactgctttaactttctagaggtgacttgcaatggccctgataggcaagttgctacatagatgtttgcattcttccaggccacctggcatgtgtctctcttatttccaattctgcaacctgagaaaacaatgtgcttttaatgggcctacctgattagttcaggcttacccagaaaaatctccgttttgccatatatgtaacataaaagaagttaaaaatgaaactgacagggaatcctggtaagaaataccctagaaggctgggtgcggtggctcacgcctgtaatcccatcactttgggaggccgaggtgggtggatcaccacaggtcaggagttctagaccagcctggcaaatacggtgaaaccctgtctctaataaaaatacaaaaattagcctggcgtgttggtgtgcgcctgtaatcccagctacttgggaggctgagacaggagaattgcttgaacgtgggaggcagaggttgcagtgagccaagatcacgccactgtactccagcctgggtgacagagcgagactcctttaaaaaaaaaaaaawagaaatatcctagaagcattaaaagatcacatactagaggaaattttacaagtaaacacacattggaaaagttaatcaagaaaataacaagttaccagtctcttgatcaccaatactgctggggagarggggaataaattggtacagcctttttgtttaattagattccatttgtcagttttggcttttgttgccattgtttttggtgttttagtcatgcagtcttggcccatgcctatgtcctgaatggtattgcctaggttttctaggttttttatggttttaggtcttacgtttaagtctttaatccatcttgagttaatttttgtataaggtgtaaggaaggggcccagtttcagttttctgcatatggctagctggccagttttcccaacagcatttattaaatagggaaccctttccccgttgcttgtttttgttaggtttgtcaaagatcaaatggttgtagttgtgtagtgttatttctgaagcctctgttctgttccattggtctacatacctgttttggtaccagtaccatgctgtttgggttactgtagccttgtatagtttgaagtcaggtagcgtgatgcctccagctttgttctttttgcttaggaatgtcttggctacatggattcttttttggttccatatgaaatttaaagtagttttttctaattctgtgaagaaagtcaatggtagcttgatggggatagcattgaatctatacatttgggcattatggccattttcctgatattgattcttcctatccacgagcatggaatgtttttccatttgtatccgctcttatttccttgagcagtgctttgtagttctscttgaagaggtccttcacatcccttgtaagttgtattcctaggtattttattctctttgtagcaattgtgaatgggagttctctcatgatttggctctctgtctgttattggtgtataggaatgcttgtgattttttcacgttgattttgtatcctgagactttgctgaagttgtctatcagcttaaggagattttgggctgagacaatggggttttctaaatatacagtcatgtcatctgcaaacaaagacaattttacttcctcacttcctgtttgaataccctttatttctttctcttgcctgattgccctgaccagaacttccagtactatgttaataggagtggtgagagagggcatccttgtcttgtgcaggttttcaaagggaatgcttccagtttttgcccattcagtatgatattggctgtgggtttgtcataaatagttcttattattttgaggtatgctgattttgaactttttaaagcaattttattcctaagttttttaacttttttgatgctattatggatggagttttaaaaatttcatttcagattgcactagcatatatggaaatgcagttgatttttgtatatggatcctgtgacttagctaagtttctttactagttctagagaggttttgttttgttttatttgtcaattccttagaattcactactcataagataaagtatcatccttgaaaatgatatccttggaggtccacattactcttattcaagtgatgttgccatagcttaaaacatttttggaagtccttattcaggctttcttacacaagttaccaagcacataagaaaatcagtttttattatttattagtgtgtgtcttgctttaatttttcttcttctttctttttatcttagtatcttagatctgtactgaggatatgttattttttatatatctgatagaccaagcttgtccaacctgtggcctgcaggccacatgcggcccaggacagctttgaatgcggcccaacagaaatttataaactttcttaaaacatgagatttttttgtgatttatttatgtttgtttgtttattggttgattgatcgtgcccaaaagctgtcattagtgttaatgcattttatgtgtggcccaagacaattctttttccactgtggcccagggagaccaaaagatgaggcacctctgtgatagacattaaaggatgaaatttaggcayacagttttatatatgcatctgacattcaaggaaaaagctgtggatggaaggttaagcttgtgagttgtcagatcatagttaaagccatgggatcagatatgatcacctaaagagattaactagaaatccaacaaccctcagaagtaaaattgagtaggtccaaaaaaaggcttgagggatgacctgaggctggaatctaaggggtttgagggaagcactttaagaatactactaattaatcatcaattcatttgtgagccacctgcctggatgaaatattttgttaattwttttttttagtccctcattattgttttgaaagagtatacatgtctttcacaggaaattaatctctataagttcagtgatgcatgtactgcttttccttttgaatcatttgaatagacattacttgtcatttttttcctccagagcaatatgattggtaatcattaaacattttagtcattattccatactaatttaacagccagcttggtatattattctgcttctgttatctacattgcaaatattattgacttcatgagagtcatcccaaataatctgcttttctttcattcctaggcaaatactgtggtctggggttgcaaatgaaccattcaattgaatcaaaaggcaatgaaatcacattgctgttcatgagtggaatccatgtttctggacgcggatttttggcctcatactctgttatagataaacaaggtaattttcaccttttgcaatggttcctacagtttgtaatttctaacaacaaaaataaaatgctttttttaagtacctgttttctgaaattggaatagagcagaaagactgaacaattaatagcacatatataaatttgacaaataaggtgagttcagtttcaaagttccaaaaataaaagtacataaacgttacttccctttccttagtaaaggaaatactgctgaaatgctgattttttttatttttataagattggaacacgagctataataactttttttttttttgagacagagttttgctcttgttgcccaggctggagtgcagtggtgtgatctcggctcaccgcaatctccacctcccgggttcaagcaattctcctgtcccagcctcctgagtagctgggattacaggcatgcgccaccatgcccagctaattttgtatttttagtagagatggggtttctacatgttggccaggctggtctcgaactcctgaccccaggtgatccgcctggctcggcctcccaaagtgctgggattacaggtgtgagctactgcacccggcctataataacatttttaaaatttataaattattgaaatgttttatatcaatttaaaacattattattcacagtttaccacttcatagtgctgtgttaaagaccatactaccattattttcaaagaataagwtctcacatccccaggagtacctgaggagtgctgagacagcatgaaataaacatgggatatttctaaattgctaatgtttaggaggaaaatgtggtgtaaagggggaaaattaaaaacaaggttattcagatgctggtgaggttgtggagaaaaagaaaccgtatacactgtttgtgggagtgtaagtcagttcagccattgtggaagacagtgtggcaattcctcaaagacctaaagacagaaataccattcaacccagcamtcctattactggatatatacccaaaggaatataaattattctgtcataaagacataagcatgtgtatgttcattgcaccgctattcaatagcaaagacttagaatcaccttaaatgcccatcagtgatagactggataaagaaagttttggacatgtataccatggaatactatgcagccatgaaaaagaatgagatgttctttgcagggacatggatggagctggaagcccttatctttagcaaactaattaatgcaggaacagaaaaccaaatactgcatgttttcacatataaataggagctaaattatgaaaacacatggacatatagaggggaacaacacacactggggcttttgggagggtgggaggtgggagaggatcaggaaaaataactaatggataccaggcttaatacctggatgataaaataatctgtaaaacaagcccccatgacgcaagcttacttatggaacaaacctgcacatgtaccccaaacttaaaagtttaaaaacaaaagattatcaaatagaataaaatccaaaatttacctgaatctctaagataaaatgcaagacctgcatgaactctctcacgtgttttagctgctgtgggatgtgttcatttccccctgctatataggggtaccatgatgagaaagtttaatwagtrttgctagtacaagaatatatcaaaacaatcatttaaatttttaacagttgattattttgatattcagcattgaattaagttaccatttaaaagtttaaattggcttttacttcatattgtataaatgaggagattctcaagaacctcctagttgtgagaatgctgggcactgggaattataggggaaagcaagcgattcctcctcagctatggtgggcttgagataaacacgatatgtcttattgaaagtttcatatagaaagtgatagaggagagagctgttctgtgtggaggaacctgcctttccttagtttataagcagtagggcaagatgtgaaggctaacaaaatctttcatagtaaatgagaaggaaaattcatttggatgaaataatagaaaagaactagaaacattatgccaaatgaacaattaatattttcgacagaaccaggaaaacttagtcagtgtgatgttatggaaaggactcttggtatccctgcctctgccacgtgctagctggctaacctctggccagtcatttcaccactgtgagttgtatctttgaatggattcgttgtgaggactgaatctaataaaaacatgtgtactgtttgtaggctcatgacatagcagacacatacaatgttagtttccccccttctaccactgtacacatgcatacacgtgttccccacccctaccaccaaaagagtaatgtagagaacacaagtgagatgataatggattaccgtcctttaagttttacttattgaaagtcttgggttgataggtgagaggatagaaaataaagttaatttgcttcttattttcattaagtttcttaatatcaggttaaattatttattttgattcatatttttgcttttctctgttatttatcaagttgaaggtttctggaaaataagtatcctgtttttttaaaaaaaggttctcatattagatatttaaattatgaggctttttggcccacagaaaccttaatgtcctgcatgaaatttacttaagaattggctatgacctcagataaaagaatcagtatgttgtgtagcttacaaacctgtaccaaatttcaaatggctatattctattttagatgaatcttagcttccaaagatttttgaaacaaccaccttaatcaggaatttcttgatactaaaactttccaaagtcataatcatcttgggaaatctcatttaacagctcctaaaatcttattattttttgcctgtctttatcccatccatcaagcatttgttttatctgaactagaatgaattgcctgaactatattcaagacaacactggttgaatttcttattacttcttcttgggtggctttttgatgacaatttcttataatgactcattaatttgaaggttgcttggctttggttgaggtcctcagtatatttttatccaggaaacttaactgccacaatgaattccataaatattttcaaggaacctagctacatgtccctagcctagaagtctagttgaagatttagagtatttgggaatgaaaagattgtgaaaaatattgcttcatcagctacttcatttgttaggctctcaagatgacttgtgttatagcatgggttgttgatagagtcatcattttgcatgagatagactaattctcattaccttgtgcaagagcccattataaaaatctattccttttgattccttatttcctgccctatacttggcaccaaggaaacagcagtagataagacacaatcacaccttcatggracttgcagtatagggttggaaaaagatattaaacgattacttcattgcaactatgaaataaagtatggtgaaagaatcaccaaatgataggggccagaggtgtgtggggagtggaagattgataaaaagcagagttttcctgaggaagtcacttttaagctgagaagtgaaggattggagtttccaggcagacaaggaaggaaaaacattctacagaagggaacagcaggtgcaaaaacctgatggtagagaagagctctgggagaactggaaaagaaagcagagtagctgaagtagattgggttgggggagagtaggcttcattattctgaaccttacagaaaatgtaagggttggagctttttcctaagagtgcatggaagctgttaaggaagatgttaagaacagagaagtggtgtgactggatttatgtttttgtttatgcagtcttccctgctctgtgaagagcgggtcaaataaaagtaagaataaatgtagagaggcccgttaagaggctgtccgaggaggcaaagcagagatgattgaattaagaggtctcgttataaatgtaactagaattatgccagtttgtaaagactgtagagtcagacatatcttctatagggaacattycgatgaattagagtttatcttggtggaatttaagctctaggaagagtctttgagcattaggaagscctcttgggtaaagctctgagctacagtaatgcccgggttgtatcttgggctctctacctggagtcctcttccactttcatttctagttttcattaaatttttaataaagctttttcccccctctgctatttttaatgatctttgagcaatagttttcagcttttttcattaccagttatctctttccattttcacctataaacctcatttttgaaagatagtgaaaggaaaagttcccatttcctcaagcaatttgatatatagaaatatgaatcaagacttccaacaactatgagaggactaataatttctactctaaagtagcrtaatctcaacaaatttcaactgttccacagaagcagccactaaatacttccttatacaaacaaccacatctatagtcctcataataggtattctctctaacagtctattcgccacacagtgaactataataaatactgttaatcagttttcatctaccacggccagactttctgaaaatttgaacgtgtatgtggacctttgtggtatcttggacttttatactggcaacccctgtttagaagytctatagaaactcctgagttactgctggtgttactgagtgaggcagaacctaccacagtaaggtccagactcaggtaacttggatcttttaatttagtataataatgaatgtggccaggtgcggtggttcacatttgtaatcccagcactttgggaggccgaagcgggtgggtcatctgaggtcagtagttcgagacaagcctggccaacatgatgaaaacctgtctttactaaaaatataaaaaattagccgggcgtggtggtgggtgcctgtaatcccagctactcagggggctgaggcaggagaatcgtttrtttgtacccgggaggcgaaggttgcagtgagccaagactgcattactgcactccaacctgggcaacaagaatgaaactctatcccaaaataataataataataataataataataataataataaatgctactgacattttattctgaaaagtagatttaaaaacagtggttgtcattggaattgaaaaataaaatgaattttatagatgatctaaatttctgtttttgaatctgttcaacaatgaccagtttctaggaggaactggacatttgtagaatggttctgggtgacgaattttttaagttgtagttataaaacagtgaactcaaaagaaatatatacatttgcattgaaagcttcaagtccttcaagacagcatttattcatatgtaccataattggggtgtgtgtgtgtgtgtgtgtgtgtgtgcatgcatgattggaaagtggtgatcctggtattctttttggagaacatgaaattgtcacttaaaacataatactgaatcttactactttagatttcaccaactcgaaattttgtagtgctcagtctataaagtttgcctttattttggacgggagaaatagtaaatagtttaaaatttcatgtgaaataatgtagatattaatatagttcctaatcggaactcataaacacatgttcattcattgtctgccaccccttagaatctgatgacagtgcacttaagacttgtaaacagctgagcctggaaaatattcccatttaacaagattatcattgctatatgatggattatttttagaattaacaccaatagtataaaaaatatttgctgcattttttaaccacatcatttttgcaaatatttgccattttttcattcttacatcagattatatgagtttgcaaatgaaacgtagggctgactagataattcctttctagcagagtccaaatttctgtaaccggttatttttttcctgcatrgaatgttttcggctttgaaaatagagtgtgaattccttagattgtttgccttcttaaccgtacagtaattttatagaatctgttttgtttccagtactacaattggctaggttcctatttgttatttttatattgggttccaaattttggttcctgtatctggcaaacattttaaaactctgatactattaaacttagtaagattttattaatgaagtttcagtttacattcctatctttagatatgcttttatttccatacaaatgagtatgtataatgtttgtatgtataatataattaacacgcagaagaatatttgtagtttggtgtcartttgtagaacaaaggtgctgacgaacaaagtgttaccaattttgcagagaaagagaatttaaacacttaatctgttaagatggtgttaacctgaagaggcaattcacattacaggrtagagtttattcsaagctgttagataaacctgaagagcatcttaatgattttaatgttttctatgtttttaatttttttggcatattaggagtgctgagaagagactacataygtgtttgtgctgtcctgtgctgtacagtggctctatccttcactgttgataaatactaatgtatttattagcttcctagatactgtgtaggtcacaaaataattatgctatattttaatgttttgtattcattttttagtgtatggagatttagataaggagtttgatttgatccagttaaccatgtgtagcttatagcgtgtttgactacatagtttattgcttaggcaactgagctatgctttatatcatccataggaaagcattaattattttcatctgagaaaattttttctgggcttctactgtggactctgctttcatagatgacattgttatattcttaagagaaacataaggtttagtgtccactctcagtatgtaaaaggagagaagaggtaaaatacctagtatagtgtctggtacttagtaaatgttaattggctctgaatcactataaattatgttgtactatactatatatgtaaatttctcttaacagaattgcagatgctaaaaaatcaatgccagattcctataataggagcaaggaattagtcttaggaccacacaataatattgtcaggagaatttagcagaagaccaggcttatcctacatcctttagcacttgaacagagtagctgttcatatatctacgatgcaaggctattgacaagatgagaactatgaaagcaagaccacatattgtttaaggctctgggaaattggttatttaaataattttagatcacataagagagaagaatgaataggtgtacattttcttgtttcggcctatattttcttatttctagtaaataatacagtaactttggaacagtacttctgtgctttcttttttgagatggagtcttgctctggcacccgggctgtagtacagtggcacgatctcagctcactgcagcctccgcctctcgggttcaagcgattctcctgcctcagcctcccaagtagctgggactacaggcacacgccaccatgcccggctaattttttgtattttttttggtagagacggggtttcactgtgttagccaggatggtctcgatctcctgacctcgtgatctgcctgcctcggcctcccaaagtgctgggattacaggcatgagccaccgtgcctggccactttcttgagttagaataaatataggcacttgagttcaactgtgcaaaaatgtttacagcaaatatagttgtcattataccaacttattgtggtaagtgatggctactgacactactgagggtctttttcaattcattcaaraacacaaaacagtattgaaggaaaatctaaataaatatattttgcaaccctacaatctcagaaatagccaacactgtcaatcaaaaatatttctatgatagtaaccaatgtgctgatattttttgattcatttgttaacataaaatatattttcatggtattatatatgggtcaacataagatttcaagtttaaatatttcatgcaacagttacaaagttctctagcctttgcagttattatgtcttgaaaatgtttttaattgtactttattttttttaaatgtatatatcagttatggcagataatatagctaactaagtttgcaactgtcttaggaaatctgatgttggtgttttcagaaaacctgacgttcctcaggctgttattgattattggcttgccttcrcatttgtattctctcctgctctttctcacaatcacattatcctgccttcagagccccatctgagatctgcctgctctggacagccctctaggattagggaaggcaggtaatggggaaggatagaaactctttttatagatactatggttacacttcctttgggttaaactctactgtgaagactagtgtatattcaacactgaagatgctcttttgggggctatacagaaaaagagggaatgccagtttgcttcagcagaatccctgagggcattctgtttactactgccatcgctgttatctacaacacccaaatgaagtgtaccatatgtgtgatacttcgtgcagtaatgtgttacagtcatttgtatgtattgtttgattaaaattaccagaataaaattctatgcagaggctgtcagtttaaaacgtagcaaataacaggcatgggggctcacatatgtcttctcaacagtttgggaggttgacgtgggaggmttgcttgaggctgggagttccagaccagaaaggtagtgagacccccatctttaccaacaatttaaaaaattagttgggtgtggtggcacatgcctgtagttttagctacttgggaggctgaggtggaggattgcttgagaccaggaacttgaggctgcagtgagctaggatcatgccactgcactctagcctcggtgacagagcaaggaaaaagaaatgtaaattatatactgcccsgtactttgaacatatcactgatttttctagtattataggacatattaaagtggatccagcaagataagtgttttctcagtatttattataatctaagcacttcacatgtaataagttcatcttttaagttgctcagtccagaaattttagtgtatctttgactcctctctttttctcaagcttcatattcagctgccaattcttcgaatatatatgtacatgtaccagaatctgactacatcttaacagctctactactaccactctatttcaggttccaacttttacctcaattacggcaataaatttcttacctttgtttttgctgttttcccccttcaatctactctgaattcagtggtcagtatgatcttattaaagtgaaagtttcatctcactctaccaactatccttatctccaagatgctctagcattcagcttcccattactcatctgacttcatcttttacttgtctactgtggcctcaaacatgctgagcacatttcctaacagggcctttgattcccgctgcctgttctcagattcaaatacctaacacctcactccctcaccgattttaagagttttacttaaatgtcatcttcacagtgatgcctgatctgaccactgtacttaaaattgtaactccctaactttttaaaacttccttgttctcattatttttctaaagtacaatacacattctaacacagtatttttttcttactaacattgtcttttacctcccccaccccacccagaggtatactccctatacgaaggaatttttatctggttgttctttgttttatctctggtgcctagaatgacatctggtcataacacatgcttattaaatatatgctgaatgaataaatgaacgaactgccagccctggctcttttactaggctttatttcacccatcaatacagatatgctacatatgaaaggacactgttattctatgatagtttctttttattttataacagtcttattaagttataattcacacaccatacaattcccttatttaaaatatacaattcaggggggttggccaaggtgaccaactaaaaacagctagtgtgtgccgccttcatggaaagaaatagaaggggcaagtaaatacagcacttcaactggaacacccaggtacacaaacggattcatcaagaaaacaactcgactgcattccagcctgggcaacagagcaagactctgagaaagaaagaggaagaaagaaagaatgagagagagagagaaggaaagaaggaaagaaagaagaaggaaggaaggaaggaaggaaggaagaaaggaaagaaagagaaagaaagaaagaaggaaggaaggaaggaaaagaaagaaagaaagaaagaagggagcacagggttgggggtaaggtcacagatcaacaggatcccaaggctccctctccctctccctctccctctccccacggtctccctctcatgcggagccgaagctggactgtactgctgccatctcggctcactgcaacctccctgcctgatactcctgcctcagtctgccgaatgcctgcgattgcaggcacgcgccgccacgcctgactggttttggtggagacggggtttcgctgtgttggccgggccggtctccagcccctaaccgcgagtgatccgccaacctcagcctcccgaggtgccgggattgcagacggagtctcgttcactcagtgctcaatggtgcycaggctggagtgcagtggcgtgatcttggctcgctacaacctacacctcccagccgcctgccttggcctcccaaagtgccgagattgcagcctctgcccagccgccaccccgtctgggaagtgaagagtgtctctgcctggccgcccatcgtctgggatgtgaggagcccctctgcctggctgcccagtctggaaagtgaggagcgtctccgcccggccgccatcccatctaggaagtgaggagcgcctcttcccagctgccatcacatctaggaagtgaggagcgtctctgcccggccgcccatcgtctgagatgtggggagcgcctctgccccgccgccccatctgggatgtgaggagcgcctctgcccggccgagaccccgtctgggaggtgaggagcgtctctgcccggccgccccgtctgagaagtgaggagaccctctgcctggcaaccgccccgtctgagaagtgaggagcccctccgcccggcagctgccccgtctgagaagtgaggagcctctccgcccggcagccaccccatctgggaagtgaggagcgtctccgcccggcagccaccccgtccgggagggaggtggggggggtcagccccccgcccgaccagccgccccaaccgggagggaggtggggggttcagcccccggcctggccagccgtgnnnnnnnnnnnnnnnnnnnnnnnnnnnnnnnnnnnnnnnnnnnnnnnnnnnnnnnnnnnnnnnnnnnnnnnnnnnnnnnnnnnnnnnnnnnnnnnnnnnnnnnnnnnnnnnnnnnnnnnnnnnnnnnnnnnnnnnnnnnnnnnnnnnnnnnnnnnnnnnnnnnnnnnnnnnnnnnnnnnnnnnnnnnnnnnnnnnnnnnnnnnnnnnnnnnnnnnnnnnnnnnnnnnnnnnnnnnnnnnnnnnnnnnnnnnnnnnnnnnnnnnnnnnnnnnnnnnnnnnnnnnnnnnnnnnnnnnnnnnnnnnnnnnnnnnnnnnnnnnnnnnnnnnnnnnnnnnnnnnnnnnnnnnnnnnnnnnnnnnnnnnnnnnnnnnnnnnnnnnnnnnnnnnnnnnnnnnnnnnnnnnnnnnnnnnnnnnnnnnnnnnnnnnnnnnnnnnnnnnnnnnnnnnnnnnnnnnnnnnnnnnnnnnnnnnnnnnnnnnnnnnnnnnnnnnnnnnnnnnnnnnnnnnnnnnnnnnnnnnnnnnnnnnnnnnnnnnnnnnnnnnnnnnnnnnnnnnnnnnnnnnnnnnnnnnnnnnnnnnnnnnnnnnnnnnnnnnnnnnnnnnnnnnnnnnnnnnnnnnnnnnnnnnnnnnnnnnnnnnnnnnnnnnnnnnnnnnnnnnnnnnnnnnnnnnnnnnnnnnnnnnnnnnnnnnnnnnnnnnnnnnnnnnnnnnnnnnnnnnnnnnnnnnnnnnnnnnnnnnnnnnnnnnnnnnnnnnnnnnnnnnnnnnnnnnnnnnnnnnnnnnnnnnnnnnnnnnnnnnnnnnnnnnnnnnnnnnnnnnnnnnnnnnnnnnnnnnnnnnnnnnnnnnnnnnnnnnnnnnnnnnnnnnnnnnnnnnnnnnnnnnnnnnnnnnnnnnnnnnnnnnnnnnnnnnnnnnnnnnnnnnnnnnnnnnnnnnnnnnnnnnnnnnnnnnnnnnnnnnnnnnnnnnnnnnnnnnnnnnnnnnnnnnnnnnnnnnnnnnnnnnnnnnnnnnnnnnnnnnnnnnnnnnnnnnnnnnnnnnnnnnnnnnnnnnnnnnnnnnnnnnnnnnnnnnnnnnnnnnnnnnnnnnnnnnnnnnnnnnnnnnnnnnnnnnnnnnnnnnnnnnnnnnnnnnnnnnnnnnnnnnnnnnnnnnnnnnnnnnnnnnnnnnnnnnnnnnnnnnnnnnnnnnnnnnnnnnnnnnnnnnnnnnnnnnnnnnnnnnnnnnnnnnnnnnnnnnnnnnnnnnnnnnnnnnnnnnnnnnnnnnnnnnnnnnnnnnnnnnnnnnnnnnnnnnnnnnnnnnnnnnnnnnnnnnnnnnnnnnnnnnnnnnnnnnnnnnnnnnnnnnnnnnnnnnnnnnnnnnnnnnnnnnnnnnnnnnnnnnnnnnnnnnnnnnnnnnnnnnnnnnnnnnnnnnnnnnnnnnnnnnnnnnnnnnnnnnnnnnnnnnnnnnnnnnnnnnnnnnnnnnnnnnnnnnnnnnnnnnnnnnnnnnnnnnnnnnnnnnnnnnnnnnnnnnnnnnnnnnnnnnnnnnnnnnnnnnnnnnnnnnnnnnnnnnnnnnnnnnnnnnnnnnnnnnnnnnnnnnnnnnnnnnnnnnnnnnnnnnnnnnnnnnnnnnnnnnnnnnnnnnnnnnnnnnnnnnnnnnnnnnnnnnnnnnnnnnnnnnnnnnnnnnnnnnnnnnnnnnnnnnnnnnnnnnnnnnnnnnnnnnnnnnnnnnnnnnnnnnnnnnnnnnnnnnnnnnnnnnnnnnnnnnnnnnnnnnnnnnnnnnnnnnnnnnnnnnnnnnnnnnnnnnnnnnnnnnnnnnnnnnnnnnnnnnnnnnnnnnnnnnnnnnnnnnnnnnnnnnnnnnnnnnnnnnnnnnnnnnnnnnnnnnnnnnnnnnnnnnnnnnnnnnnnnnnnnnnnnnnnnnnnnnnnnnnnnnnnnnnnnnnnnnnnnnnnnnnnnnnnnnnnnnnnnnnnnnnnnnnnnnnnnnnnnnnnnnnnnnnnnnnnnnnnnnnnnnnnnnnnnnnnnnnnnnnnnnnnnnnnnnnnnnnnnnnnnnnnnnnnnnnnnnnnnnnnnnnnnnnnnnnnnnnnnnnnnnnnnnnnnnnnnnnnnnnnnnnnnnnnnnnnnnnnnnnnnnnnnnnnnnnnnnnnnnnnnnnnnnnnnnnnnnnnnnnnnnnnnnnnnnnnnnnnnnnnnnnnnnnnnnnnnnnnnnnnnnnnnnnnnnnnnnnnnnnnnnnnnnnnnnnnnnnnnnnnnnnnnnnnnnnnnnnnnnnnnnnnnnnnnnnnnnnnnnnnnnnnnnnnnnnnnnnnnnnnnnnnnnnnnnnnnnnnnnnnnnnnnnnnnnnnnnnnnnnnnnnnnnnnnnnnnnnnnnnnnnnnnnnnnnnnnnnnnnnnnnnnnnnnnnnnnnnnnnnnnnnnnnnnnnnnnnnnnnnnnnnnnnnnnnnnnnnnnnnnnnnnnnnnnnnnnnnnnnnnnnnnnnnnnnnnnnnnnnnnnnnnnnnnnnnnnnnnnnnnnnnnnnnnnnnnnnnnnnnnnnnnnnnnnnnnnnnnnnnnnnnnnnnnnnnnnnnnnnnnnnnnnnnnnnnnnnnnnnnnnnnnnnnnnnnnnnnnnnnnnnnnnnnnnnnnnnnnnnnnnnnnnnnnnnnnnnnnnnnnnnnnnnnnnnnnnnnnnnnnnnnnnnnnnnnnnnnnnnnnnnnnnnnnnnnnnnnnnnnnnnnnnnnnnnnnnnnnnnnnnnnnnnnnnnnnnnnnnnnnnnnnnnnnnnnnnnnnnnnnnnnnnnnnnnnnnnnnnnnnnnnnnnnnnnnnnnnnnnnnnnnnnnnnnnnnnnnnnnnnnnnnnnnnnnnnnnnnnnnnnnnnnnnnnnnnnnnnnnnnnnnnnnnnnnnnnnnnnnnnnnnnnnnnnnnnnnnnnnnnnnnnnnnnnnnnnnnnnnnnnnnnnnnnnnnnnnnnnnnnnnnnnnnnnnnnnnnnnnnnnnnnnnnnnnnnnnnnnnnnnnnnnnnnnnnnnnnnnnnnnnnnnnnnnnnnnnnnnnnnnnnnnnnnnnnnnnnnnnnnnnnnnnnnnnnnnnnnnnnnnnnnnnnnnnnnnnnnnnnnnnnnnnnnnnnnnnnnnnnnnnnnnnnnnnnnnnnnnnnnnnnnnnnnnnnnnnnnnnnnnnnnnnnnnnnnnnnnnnnnnnnnnnnnnnnnnnnnnnnnnnnnnnnnnnnnnnnnnnnnnnnnnnnnnnnnnnnnnnnnnnnnnnnnnnnnnnnnnnnnnnnnnnnnnnnnnnnnnnnnnnnnnnnnnnnnnnnnnnnnnnnnnnnnnnnnnnnnnnnnnnnnnnnnnnnnnnnnnnnnnnnnnnnnnnnnnnnnnnnnnnnnnnnnnnttccagatgtcaaagcagttcagactgaggggaggcttttaactttttaggataacatctataagtttcaatatatggaaaagatatctgcactcccatctttatcgcagcactattcacaatagctaaaatatagaatcaatctaagtatccatcaatggatgagtgaataaagaaaaggtgatgtatacacaatggaatattattcagcaatgaaaaagaatgagatcctgtcatttgcagcaacaggcatggaactggaagtcactgtgttgtgaaataagccaagcatggataagcaaatatcacatgttctcactcatatttgggagctaaaaacgtaaatctcatgaagttagagaatagactggtggttactggaggctgaaaggggaggaggtggggggatgaagagaggttgattaatgggtacaaatatacagtttgatagaagaaataagacctggtgtttgatagatcagtaaggtgactatggtttacaataatctgttgtatattttgaaatagctagaagggaataaagcaaatgttttagcataaagaaaagtattcaaggtgatgaatatcccaattacwctgatttgatctttgtgaattctatgaatgtattaagttatcatatgtactccccaaaataggtacatctattatgtatcaataaaaaaatttaaaacaaaaaaaaaaaaaaaaagaaaacaactctactcacagagaatggaaaaaagcaaagcaggacaaccacccactcaggaacgacacagggccagaggagcctcccccacccagggaagtggtgctggaaaatccgaggtgactggggaccagagcaggcccctagtttactggagtagtcatggaaaagtggccagactgtttcttacatgggtctccactcccatatctcctcactgggmaagtcctccaggcttgggtttccagcctcccttcactgggactttggagccagtagcagctctgcagcaacctgggacagagctcccactgggagggtggtgtttccatcttttctgccttgcagccctcacctttgctgtttccaggctctggagagtccatgggactgaagcctggtctgaaccccaagcacagtacccatctcaccraaaagtggtcagacggttctccatgtagatcctggtcctcacttctcctcactggacagggctgcctgacctgggactccagcacaaccactgtacccccacctgaccacttcaattagaggcagcccagcagttaaaggaacacccacacagagagatgagaaagaactaacacaagaacttcagcaattcaaatggccagagtgtcttatgtcctcctaacgattgcactagttcaccaatgagggttcttaaccaggctgagttggctgaaatgacagaaatagaattcagaatatgcacaggaatgaagagcatcgagattcaggagaatggcaaaacccaattcaaggaaactaagaattaacaataaaacaatacaggagctggcagataaaatagccagtgcaaaaaagaatctaactgacctgatagagctgaaaaacacactacaagaatttcacaacccaattgcaagtattaacagcagaatagaccacgctgaggaaagaatcttggaacttgaagactggctctctgaaataagagagtcagacaaaagtaaagaaaaaaagaatgaaaaggaatgaataaaacctctaagaaataagggattatataaagaagccaaatctgcaaatcactgatatccctgaattggatggggagaaagcaaacaacttggaaaacatatttcaggatatcatctatgaaaatttccccagcytcgctagagaggccaacagtcaaaattcaggaaatacagagaacccctgcaagattctacacaagatctccccaagacacataatcatcagattttccaatgtctaaataaaagaatgttaaaggcagctagagagaaagggcagatcaccaacaaagggaaccccatcaggctagcaacagacctctcagctgaaaccctgcaaactggaagagattggggacctatatttgacattcttaaaggaaaaaaatcttcaagaatttcataaccagccaaactaagcttccttagcaaaggagaaataagattcttgtcagataagcaaatgctaagcgagttcattaccaccagacccacctttcaagacatcttgaagctagcactaaatatggaaaagaaaaaccattaaaacaccactaggaaaatacactcaagtacacacaccagtgacactataaaggaaccacacaaacaagccagcataataatcagctaacaacacaatgacaggatcatatgcacacatatcaatactacccttgaatgtaaatagcctaaatgccctatttaaaaaggcatagagtggcatgctgaataaaaaagcaagacccaatgatacgccgtcttcaggaacccatctcacatgcaatgacatccataggctcaaaataaagggatggaggaaaatctaacaagcaaatggaaatcagaaaaatgcaggcattgcaaccctaatttcagacaaaacagactttaaacgaacaaagctcaaaaaagacaagggcattacataatgtaaagcattcagttcaacaagaatacctaactattctaaatatatatgcactcaacacaggagcacccagattcataaagcaagttcttagaaacctaaaaagagacttaggctcccacacaataatagtgggagactttaacactccactgacagtattagacagatcatctaagcagaaaattaacaaagatattcaggacctaaactcaacactrgaccaaatgtatctaatagacctctacagaactgtccatccaaagacaatagaaaatacattcttctgattgccacatgacacatactctaaaaatgaccacataatyggacataaagcaatcagcagatgcaaaagaaccaaaaccataccagacacactctcagaccacagtgcaataaaaatagaaatcaaaactaaaaaaaatggctcaaaaccatgcaattacatggaaatgctccagaataactttggagtaaataatgaaattaaggcaaaaatcaagaagttctttgaaactaaatgagaacaaagatacaacattccagaatctccgggatgcagctaaggcattgttacaagagaaatttatagcactaaatgcccacatcaaaaagttagatctcaaattaacctaacatcacaactaaaagaactagaaaagtaagagcaaaccaaccttaaagctagcagaatatgtataatcaaaatcagagctcaacctgaaggacagtgagacgcagaaaaacattcaaaaggtcaacaaatcaaggagttggttttttgaaaaaaattaatgataggccactagctagattaataaagaagagagaagggccaagagcggtagctcatgcctgaaatcccagcactttggaggccaaggtgggtggatcacttgaggtcaggagttggtaatgagcctggctgacatgatgaaacctcgtctctactaaaaataccaaaaaaaaaaaaaaaattagctcagcatggtggcatgtgcctgtaatcccagctacccgggaggcggaggttgcagtgagccaagatcacaccactgcactgcactccagcctgggcaacagagcaagactccatctcaaaaaaaaaaaaaaattactagcatttctgtacaccaaaaacagtcaagccaagagcctaatcaagaacacaatcccattcacaattgccacaaaaagaataaaatacctaggaatgcagctaactggggaggtgaatgatctctacaacaggaattacaaaacacagctcaaagaaatcagagatgacacaaacaartggaaaaacatgccatgctcatgaattggaggagtcattatcataaaaatggccattctgtccaaagtgatttacagattcaatgaaattgttatcaaacttccaatgacattcttcacagaactagaaaaaactactttagaattcatatggaaacaaaaaggagcccaaatagccaaggcaatcttaaacaaaaagaaaaaagctgcaggagtcatattacctgacttcaaactgtactgcagggctacagtaaccaaaacagcatggtactggtacagaaataggtgcgtagaccaatagaacagartagagagcacagaaataaggccacatatctgcaaccacctgatcttcgacaaagctaacaaaaataaacaatgtagaaaggactgcctatttaataaatggtgctgggataactggctagccatatgcagaagattgaagctggaccccttccttatatcatatccaaaaatcaactcaagatagattaaacacttaaatgtaaatctcaaaactataaaaaccctggaagacaatgtaggcaatagcattctgtcataggaactgtcaaagatttcatgatgaagacaccaaaaacaatcacagcaaaagcaaacattgacaaataggatctaattaaaattaagagcttctgtacagcaaaagaaactatcaacagagtaaacagacaacctacagaatggggagaaaatatttgcaaagtgtggatctggcaaaggtctgatatccaacatcrataaggaacttaaacaagtttacaagaaaaaagaaacattaaaaagcaggtaaagaacatgagcagacacttttccaaagaagacacatatgtggccaataagcataagaaaaaaagctcaatatcatcgatctttagagaaatacaaatcaaaaccataatgagataccatctcataccagtcagaatggctattattaaaaagtaaaaaaataacatgctaatgaggttatggagaaaagggaacacttaaacgctgttggtgggagtgtaagttcaaccattgtggaaaccagtggtgattgctcagagtgctaaaagcagggccaccatttgacctagtaaccccattactgggtatatacccagaggaatataaattgcactcatattgttcattgcagcagtatttacaatagcaaagacatggagtcaacctaaatgtccattaatggtagactggataaagaaaatgtggtacatatacactatggaatactatgcagtcataaaaaagaatgagattatgccctttgcagggacatggatggaactggaggccattaacctcacaggaagagaaaaccaaataccacatgttcttacttttaagtggcagttaaatgtagcacatggacacataaaggggaacaattgacactgaggcctactggagggtgggaggagggagaggaacagaaacaataactgtgggatgctaactaggcttagtacctagatgacaaaagatacagcaaacccccatgacacaagtttacctatataacaatcctgcgcatatacccttgaacctaaaataaagttaaaaggaaaactacctgttggrtactatgttcactctcttggtggtggggtctgtaccccaaacctcagcaccatgcagtatacctatgtaacaaacctacacatgtaccccgtatctaaaataaaagttgaaattaaataataaaatatctgtatatacaattcattgatttttcagtgtatttagagttgtacagttatcaccatagtcaattttagaacatatttatcaccccaaaggaaattccttagttagtagcagttattccccatttctctcctcttaaccccctacaatcctaggaaaccacgaatctactttttattgctatagatttgcctattcgaaacatttcatataaatgtatcacatagtatgtggtcttttgtgactagcttctttcacttagcatattttcaaagtttatcaatgttgtagcatgaatcagtacttcatttctttttatggccaaataatattccattgtatgtatatacaccccattttgtttatctatccattcatcagttgatgaacttttgtgtacaaatgttggtggggacataggtttttaattctcttgggcatatacctaggagtgagatttctgggtcatatgctaactctttgtttaatattttaaggaactgccaaaccattttccaaaacagttgcaccattttacaattttactagtactgcataaagactccagtttctccacatttttgccagtgcttgttatgtcttttttattttcgccatcctagtgagtgtatggtggtgtctcactgtgattttaatttgcatttccctgatggctaatgatgctgagcatctttttatgtgcctgttggccatttgtatatcttctttggagaaatgtctgttcatatccattgtctgtttttaaattggttcctttgtctttttaatgccacataataatattctttattctggatattagatacatctgttttcattgatatatcatttgtgaatgttttctcccattctgtgtgccatctttctctttcttaatggtgtcctgtgaagtacaaaagtttttaatcttgatgaacttccatttatttttatttgttttcttgtgcttttggtgttttatctaagaaatcactgcttaatccagagttgtgatattctcatatatttttttctaaaagttttatagtttcagctcttgagtttagatccactttattttgtatgtagtktgaggtacgggtccaattcatttgtttgtttggtggatatccagttgtctcagcatcatttgtctaaaagataattcttccccccattgaattgtctaggcacccttgctgaaactcagttgactataaatttgagggtttatttctagattttcaattctgttcctttgattatgatgacttatacattgctatcagaaatctctggggcagatggatttttctggagctaggctgtgttcttattagctgggagcattgtagtaatgacaattttctggaaggctgtttacttgggaaaagcttttaagaaagacattttaaagcttcttaattgcctgctttatttgatgttgttttctttgtagagttgtaaaggtcaaagtgtgtacttaaggctttctttatcttcagtcttcttggctctccttgtagctgtccattttgaattcttatttttctccttgagagctctttgaacttccatggaatttgagagcaactttagtgagttgcacatttgcatggcatagttttggagtctcagcactgcatgcacttacaaccaaagccctgttctgatcaaataatccatagttgaccagatttctggcatgtggctggaagataatggggccagctggcagtcttcttgtggtttaagtgccatattggaccacacagtacctttcatcccaggctattaatcttagaaattcaacttctaatcttagaagtcggaaatttttttggtggagcagaaagtggaaaattgattcttgttgatgctgggcaaagattgacaggaataactagagaactggtaattcaatttgcctgctcttctggttggtcaactgggtggtagtgagcccctatttaggcatctatcctattaaattcctaaagcacagatttagcttaactgtcattcaaatgcctgtggtttataactattaatttatacacttgccttgaaaatacccctttcttactggtacaacacagttattaagctctagttcaagacacattttagttgaatagtaaacacaaaatttcttcagaattatggaataaaatgatcgattatcatatgcttgctgtggtaaccattaatttaacaaatatttatatactgttcagtgtgctaggagctatctccatcaagggtatattggctacccttgacacagttctttaatcaagcgtttatatgtaaaatcacttacttttgtgattgccttggggtcttcttccaggttttcttccctgcaggttagtaaataactggacttagccaaacatgctaatgatcagaaacttttattcatccattgattcaataaataagtctcctgtataccatatgctgttattgctactggaaatacaaaggtgaggacaaacagcctcaggctctgtccggggactaggctttatagagtgattttgcttataactctataattacaccaacaagtcaggcttacatattaacataacacattacgtttgacaacacagaatagtcatctgtttattaaaacaaacaaaacttaagtgcctactgtgtgctaaaggaatttgacttgtgaagctgagggacagcttctgtgaggaagtggcagtgaagctgagctcttagagaggaatcagctaagctaagtagtagtgggaaagccttacaagtcgagagagcagcttgtgccaggggaccaaaacaagactggagcggcgagaagccaaggcaggtacacacaagactgcagagtaagacaaggccagcacttcaagactctgtaggctgtgttgaaggctttgctgtctaacctaagagaaggaagccactgaaatggtgtgttttgttttgttttttttgctttttttttaaccaaagccactttttacatagcctatgaacttggtcttaattagaggcagattagttcttgctcagctgtattggtttctaggcagaaaatgttaaattttagaagttttatttctttagagcaatgctactgcagcttcygtgtgcttaagaaattactgagaggacttgttaaaacagatttttgggcaccaccgccagagattctgtaagtctggatggagttcaagaatttgaatttctactaaatttccagaaggtgctgatgcaccagtcctgtctctggaccagattttaattagcagttattaatagttagagccataaaattaactctctttgtcattattttccttatgtgcaaacagcaaagggtcatttttagttatataataaccaagaaatatttctgtgtgtgggtagctgtattttacagaaaccactttaaagctataaattttacttatctatgcatgttctaaatatatatatatatataaatacacatatacatatatgtgtgtatatggtatgtgacttcctgaggtgatgtagtaaacagtattgaggggacattgctccaaaaatcaagaaacttaatatcagaaagaaattgtgattaacaaaagttggyaaagtttttagtaccactttgacagtgccattgagatttttgaaaattagagtagtacagtttgggattctgagacacttggagtttcagcaaggtaatcctgtatattaatggaatcagttttttatttttgtttttctagatctaattacttgtttggacactgcatccaattttttggaacctgagttcaggtatgattatatttgtgactttttttttttttttgcttaaatgttacttttcattcacttcttcattttcattctgtatactcttagggttaatgtatattgtgtgatacatatcattgttccgagacttcaataaattagagcttacttaaagcataaagccatttagttgcatgtttacattttgcttttattgtagcatttagatctgcaaaatgaaagtatcattttaatatgctttgaaagtagaactagttgcttttcaaaatctagcaaaactcctagtaaaagttgaaaaggtatttatcttttttcaaaaaattgaaagagcatggttttggctgttatagaattctgcagtgttgttactcaagtaccatttctactatttctcttctttatgcctttgtctcttgcctagacaacttctaatcgagttcctatttctgtttgctggctgccattcacactgctgccaagttgtttccaaaatacwtatctgatcatttccctgcataaaaatcttgagaaactacttattatgataaaaaacagttgtccagatttccttaacctggtcttctcgttctttcacaagcagtcctcaggccatttttccagtctcatcttatgttctccatattgaaatgactcttgagttatttacagtgctctgagctcacagagcttttaccaggaaccacttgcctcctctgcttggcagatcattctcatctttcaagagccatcttactaacttttccgaacttactaccacttccccccaagaaccttaattttgtcttcaagaatggttctgtgtgggaagggtgccctcttcagcatttgagggggacgttagctggggtaaccctagcatcagtgtatggtagacagccctggcagagggtcagctgcgctcgcgccactctccagctccatgatctgccacaacaaatccaagctcccattatccctgtccggggctgctgtactatctgcctaatggtgtcccagcctccactcatgattccttgctatctcttttcttcccaggagccagaataatcttttttaaaaatactaatcagattatgtatgtaagctgccaaaatcctttactggcttcctatttttacttagaaatatattccatactcttcaccatagcccacaaggctcctgcattacctgcccgtctgtccagtcttctctctaactaaccttagttttgctctctggcacctacttgcactgccgtccccacttccggacacacactaggccatcctgcctcatgctgtgctcatccctctgactaatgtgcatttcccaccacttgttctagtgacaccccttagctcactgctgaggcttcacttcctaagagccccatcctgccacccccattccctgactgggggcggtacagagtcctgcataagagcatggactccagascccatttgctacctgctaactgtgtgaatgggcatacagttccttaatttccctgtttcctaaaatgaggacaacactagcatctcctccatagagttcttatatggattacctaaagcacttagggtgctacctggcaattcattaagtttactgaattaytgtgttacttgtattaagttagatttcttgcggttatttcagcatgacttttcttcatagcagaatcaaaatcaattatttgtgtaagtattggtttaatgtcttctaccactggaatataaactcagtgaggacaggggcaatatttgtctgtttgacttttgtaaacccagtacctagtactgccctacactcaacagacagcataatagacactcaaataaatgtgttgggtggatgggtagcagcgtgaatgaatgcacctcttttaatacagcttaaattggatcaatagagggttggtaaaatgtattatggcatatccacagaatagaatatcatttagytcttaaatttgatgagtaggttttatagtagaaacatgtctaccattcattatgaaataaaataatcaaggcagtatgtaataagacaaaaaaatgtttcaaatgtgtgagtaaagacatattatatatatatggatggaagaaagtctgaaagggctttttagaactggtggtcctggccgggcacagtcattcacacctgaaatcccagcagtttgggaggccgaggtgggcggatcacctgaggtcaggagtttgagaccagcctggccaacatggtgaaaccccatctctactaaaaatacaaaaattagccaggtgtggtggtatgcacctgtaatcccagctactcgggaggctgagccaggaaaatctctgagacccaggagacagakgttgcagtgagccaagaaggtgccattgcactccagcctgggcgacaagagtgaaactccgtgtcaaaaaaaagaagtggtgggtctttgagggtagtgaaattatggtattcaccttgaactgaaaaatgtgtctgtgatatttttggggggttgcttttttccytgtaaaatacagcattatgtaaccttttgcttgttttcatttctcagtaagtactgcccagctggttgtctgcttccttttgctgagatatctggaacaattcctcatggatatagagatgtaagccagatataaacttatttgaaaattgtgatataactctatttttttagaactccagagtagttagaggtgtgttaatcatatatcmttatcttttgcctttttaagacattttttaatcatatgtgttttattctttttcttctgctaaaactgttgtgttacagtaccaataatctatttttgtttatgaagtttatgaagaaactgcctagattaactgatttctcaggaagtagagtgtcttgtttatgaattattaagagaaaattaaaaatgaatcttttcttttcccttccttaagtcctcgccattgtgcatggctggtgtgcatgcaggagtagtgtcaaacacgttgggcggccaaatcagtgttgtaattagtaaaggtatyccctattatgaaagttctttggctaacaacgtcacatctgtggtgtaagtatatatgcaatttaaaaaatatatgctatatataattagcattctgggtagcaytgggctaagaactagctagatctcagcagyatcactgttaatggtgttcatgaaagaacatttaggcagtaagcactcacrttagtgtgctcagtgtctgtttttttgttttgttttgtttgagacagagtttcgctctcattgcccaggctggagtgcagtggcgtgatctcggctcactgcaacctctgcattctggtttcaagcgattctccggtctcagcctcccaagtagctgggattacaggtgtgtggcaccacgcctggctaacttttgtatttttagtagaggcggggtttcaccatgttggccaggctgctctcgaactcctgacctcgtgatccacccgcctcggccaccgaaagtgctgggattacaggcgtgacccaccgtgcccagccagtgtctgcatattttgaagagtacaggtggtgttgtactactttagcttattgttcttcaaaaatgtagtcatttggaagagtaatgtgtttcttctgtcttttctaagtgttaaaaaaaagtctacataagagtctagaagtttgttgccaaatccttatttattttacagattgaaaggcttaactactgtgttccttatagcacatggggattcaagataattgaaatactttaaatataaatttaagtttgacataaagtgttacatcataagcattattgtgaatcttcctttcattctaagagaatattttgaagatgtattttcatggtaactatagtgttctactgttttataaaacgtagggtaggcatcaaaagcaagagaaattgaaacattaaatagaaatgcagtgttagcaatctgtttttataaatcttgtctcttagatctgctcagtctttcagacaacactaagcctaattgaaaccagcttttcttcagaggtcctaggccaattttcattcagaagacacaagcatcatccatatccagattggtatacaacaggattcagcagatttgttctgtaaagatccagctaataaatattttaggctttacaggccacatgtcgctgcagcttattctttttttgttttatttatagctctttattcttaactcacggcccatayaaaacaggccatgcatgggcagtcatttgcccatccctggtatagattcaactaccttcccttctttttttttttttttttctagattattttatgcagaccctttcattcctttaccatgttatacctttaraaagatttagtgtttgtgaattctctctttcatactttaaaaaagaaaacagggataaattgcatcctcttgtaatggtttgtatgttggactaaaggcaggagtgtacactgaaacttcttccatgagatgttgatttctcctaaaaaaaaaaaaaaaaagaaaaakaaatctattagtacccaacttttctcatgtttatccgaaaaaacttgagcctcattctctgagaattagaccttttagtgtattttcatcgaaagcatttgccacagaaaagtgttaagaatccatttatttcatgaaataaagtagtgagagattgacagtaaacaatgagtaaatacatatgaaaaagaagtacatattaaagattacatagagaacttttgcacaatcacatatgaaactgggtgctagatacttgtagagaaagctgtttatgctgatttcagaagttgtcctgcttagaaatgagacttttttcctaggaacaatattagttgtctaatttttagccacacagtcttcttggttcttttattgggtggggggaaccaaatcaaaagaaaatgtttcactaaatatggggcatcatgtgttatgtgagtatcaccaaaaaaaacccttctctctttcaggggacacttatctacaagtctttttacatttaagacaagtggtaagccttttatggactttataattttttatttatataatattttttgaacactgttaggcactgtgtcagttgctgatttattgtactttctcacgtagttgtcttaataacactatgaggtaagatagttatctaataatataatgaatagagcaaattgaaagttttatatttatagagaaatggtcatgtaagcaaggaaggttccttaagaaagatgacttttgaacttgtctgaagaagtaatcaattcgttcaacagaaaatacttactgagtgccttctctttrtgtgccaggcattgctctggttcgagtgatagagtaaagtgaacaaactcctgccttcctggagcttacattctagtagtgagagattgatgataagcaatgaataaatttctgtttataatgtactgtttacaatatgataaaagatgtaggaaaataaggaggactggattgaagttgggaagggccttcctcccagggaagacctcagggagaatgcaacataggccaaaaacctgaaggaggtaaaggagtgagttactcagttatttgggaagagtgtcccagggagaagataatgtatctccattaaactaacagtcatgcttataaatgagcatgtttgtaggtttcctaatgatacacaaagacatatgcccaagaaacacttgcctagttttgaaatttctctgttacagtgtattattagtgtagtgtatgttaattaaagatggaatagaaagttttcagtgagcaggtctacatgcattttgaaattatacctggaaaccaaatttagtcttttctttgtttcaggatgttatggaacactggggatggagtctggtgtgatcgcggatcctcaaataacagcatcatctgtgctggagtggactgaccacacagggcaagagaacagttggaaacccaaaaaagccaggctgaaaaaacctggaccgccttgggctgcttttgccactgatgaataccagtggttacaaatagatttgaataaggaaaagaaaataacaggttaagagacaaaaattttctaaagcaatttgtaacacttattttatttgaaaaactagtaacatctaagattttcagagaaaattaaggcattaaaattgtaattatatggttttatattttcttcactgatgttaatattactagagacacattttatgaaacatggcagagaaaaggagttatttgtgttggtcagggttctctaaaaggacacaactgataggacagatgtatatataaaggggagtttattaaggtgtatcgactcacatgatcacaaagtgaagtcccacagtaggccatctgcaagctgaggagcaaggaagccattccgagtcccaaaacctcaaaagtagggaagccracagtgcagcttttagtctatggtcaaaggtccagaagtcccaaagctaagaacttggagtctgatgttcaagggcaggaagcatccagcatgggagaaagatgtaggctgggagacttaagccagtttagtcttttcacattttcttctgcctgtttttattctggccgtgctgatgcagattaaatggtgccgacccagattgagggtgggtctgcgtgtcctagtccactgactcaaatgttaatctcctctagcaacaccctcacagacacacctgggaacaatacttttcatccttcaatcaagttgacactcagtattaaccatcacagtayttaattcgtaatagctttttgtttccattgtaatgagactctttttttaaggtagtgtttcagtaaagtggtcttgagacatctaaaataacggtctcctacagtcattaagagaaatttatgttaaaggagtccattttaaatgatgagatcattaattttccacatgtggagagtataaatttaatttaggggaacttagcaaatggtcggaataattggttgggattggtttaattttgttaaaatatttattttgttttggtactgtaaataataccaataatcatctttaatctgttcattcccaggaagtcatcttacccagtagtcaaaatctattttacgacrttataaacacaagacaccaaaacagaatagttctttacttaattaatgcccacccataatccttcctctctctccaagggaataaggccaaggatttagtaattgttatgacaaaaacgtgcacttggatatggaaatgagccataattagaaatgttcgagctgtgcatttcaagtgtttatactttgatgctgaacaaacttagggaatcagaccatgtgcattaatgaaagcaactcttcattccccaggcattataaccactggatccaccatggtggagcacaattactatgtgtctgcctacagaatcctgtacagtgatgatgggcagaaatggactgtgtacagagagcctggtgtggagcaagataaggtaaaatgattaccaaggtatttttaaaaaacattttttaartgggtggttgccaagtcacagagctctcctgtataaaagagatgtagaagtttagaatgtcttatactaccctcttgtggttattttaggtagtgttattggccttactctactgactttagaaaattctcagtagttctaggttccttttggtgattgtaacggtgagtacttttctgatttttgtcattgcatttttaattgaattgtttagacactttattaagaaagtctaaaagggaccttgtaatttcttatttttatgaagcttttttcaattcaccagatgatggagagcctttgttcccagatttctactctgtaggcaagaggtaaaaaaagaaaaaagctgaaaaccaacgtgcattaaattataggatattagagatgaaaattcatctgaagatcatctcaccaactttcatcttgggaaacttctgttttttcttacatgaagaattgctctagcatctaattatggaatctttgttttagttagcaacaatttatgaagatgctggaatgagccagaggaaatgataaggggtggggagcaggcagagatgggtcttattcagatgtgtatccctttgatctttaaatggagaagtccttgtgcctaaggaagatagatgtctcccatcagtaccaaaactatgggkctgggcatgatggctcactcctgtaatcacagcactttgggattgcttgagctcaggagtttgaaaccagcctgggcaacatggcaacacrccatctccactaaaaatacagaaaattagccaggcatggtggcgcatgcctgtagtcccagyttcttgggaggctgaggtgggagaatcacctgaacccaggaggttgaggctgcagtgagctgtgatcactccactgcaatccagcctgggygacagagggagactctgtctcaaagtggaaaaaaaagaactgaaacaatgatgacattttttcaaactttcctatgagtttgattttgattatatatttttgttttttatcatgtatgatttgctaaaaagtcttcaattactacttttctcatctctttgttcaaaaacctccaggggctcattatctttcatatgcatcttaactcctctgcttttattcaaggcctctttcttctcttctacttggcgtcacatgaacttcatctttggtgagcctctccctgttaaagaaaataacaatactgtctccatacatatcttctacctcatgcccctaaacttgactactctttactcctgccacatccatattcatttgtatcacatttattttgcttgtggaatatagctaaatttttggaatgttaagaattgttcaggcttatactataaaaacttctaaacattaaatgatatttctgaaaaagattctatgttgcattcatttttgaaaggtaatttctctaagtgtagaaatctgggttgatcagtggttttttggtttttttttttttttggtttttcctttcaataattgaaatacgttgtctgctgtttgctggcttgcattgtttttgacaagaattctgctattatttctgttcctcaatatgtgatatgtctttttttctgtggctccttttaaggttttctttttatcatttgttttaagcagtttgattgatgtggcttttttatatttttcttcttttttttttgcgtggggttctttgaggtttttggatctgtaggttatgatttgcatcaaatttagaaaattgtagttcttttttttttcaaatatttcccttccccaattctaattttatgaatattatgacccttgaaggtatcttaccattcaccaatgctccgttctttatttttttcagtctttttctctttgtattttagtttgaaagttttctgttttgtcttcaagttcactaatctattcttctgaaatgtctaatctgttaatcccatccaatgtatttttatctctgatactgtattttttatctctagatgttcagtttgggagttttaagatgtctccagtgtgtctttacatgctcatgcttttctctatctctggaacatggagcatatataatagctcttttaatatcctcatctgctaatgttatcctatgtcatatatgggtctttttatgttgattgatattatggatcatattttacctgcccgaattttttttaytggatgccagacattgtgttacattgtttggtgctggggttttttgttattaatattcccttaagtatttttgagctttattctggaatgtagttaagctactggaaacaatgtgatattttcaaggcttgcttttaaacttcattaggcaggacctggacagccttcagttttcttatttttctcccccactgagacaatactgttctaagtactcactgcagcatcccatgtattatgaggtttctctgttctacctcttggcagtgtaaggaattcccagatctacggagctgtgagacttgtcctgctgactcattccagtgtttcttttactggccataggtcatttctttacatgcagctgaagatttaagggataactccttatatattctagaagtgtctctctctctctctctcactcaytctatctttatagctctcttctctcctaatctctgcctacaaattctagctaccttattggcctcccactctcagctctgtctctgcaactcagtgagaccggcaggctctgttagggatctctctccctgcactgtggcctggaaactcttctatagacagtactggggcaataaatagcagggttcaccttatttgtttcccttctttccgtcattattgcccaaggcagcctgttatccagtttctcaggtacgtatagggctgaacaataagtctaatccgttactcttatggtcagaaatgcaaatcttcacattgaattgtatgaattaacagtcttttcccgctcatgtaagtccatctgctccctcatcacctccaacccaagggtaattggtgtattcattttaccccttttctgagcctgcacatgtgcatgagtacgcagagactgcatttggttttgtttttagaaaatgggatttatatatatatatacaatttgttttcataatatatcactttctaacattatgccatatttatgtgtggtaatcaataaaatttaagtttcttgagggtgggaactgtagcaaccatatccattttctcttcatgacacctcacatacttctctgtacatgaggattctcagtaaatgctcataggttgactatagcaaatcttttttactcagtttttataaaattgagacagcaatatagaggaatatcttaaagatagtttttatgtgttaaagtaatgatttgttatcgtccctgttccactaatatagtaagaatgaaaataattgcctttcattttatttcagagtaatatctgaggaaatcacgggagctcactagtatggaagttattgtaactgcaaaacaaactttttaggaaatgaaggatattaacacatctttcgagatttatagtctaatgccaagtgaattagccaagaagaaatagagccacaatacttggaaatagcttgattgagaagttaaacatttacttaatctcatcttagctgattagaaaaaaaatcactttgattttaggcaatatatgcttattaatggtctttagaaactacctagttgatctgacctagagaacaaacagggctctttttagcttattggagtccatacttaagtcrgaagacccagagtcaagttgctgccctgtcattgactagctgtgcaatccacttacagattcctgtgccctcctatttcatagggttgtctgaattagttacattaaaatgttttataaataattaagtgctggtccattgtaagatactatcattatttgcttgaagtagttaagggaatgagactcacctaaactcatatttttacctagggattatttttataatgcatttgttgctagttagttacaagcattaaattagtcacaggccaggcgtggtagctcacacctgtaattccagcattttgggggaggtctaggtgtgagtatacttgaggacaggagtttgagaccagcctgarcagcatagcaagacccctttctacaaaaataaaaaatcaccaggtgcagtggctcattcctgtaatctcagcactttgggaggctgaggcaggtggatcccttgaggkcaacatggtaaaaccctgtctctactaaaaatgcaaaaattagccgggcgtgttggtgcacacctgtaatcccagctactcaggaggctgaggcaggagagttgcttgaacttgggaggaagaggttgcagtgagccaagattgcgccactgcacactagcctgggcaacaaagcgagacctcttttctaaataaataagtaaatattgccacacatgttggcatgcgcctctgtagtcctagctactcaggaggctgaggtgggaggatcttttgagcccaggagttctaggctgtattgtgctatgatcccgccaatgcattccttggatgacagagcaagactctatctctaaaaataattaataatttaagcataaaatagcatttcaaagtcacttctagtttaaatagcagcatggaacaaaaaccgggataataggagaactgtctttatgcagtttatccagtaggtggaggtatatatctgttatatgtttgttagtatatgttcaccttcagcctgttgagagaaaaattatgaaaagtacacaagcaaaatatttcccctaagacttggcatgatcaattttgttttactttaaaaataaaaattaatatatttaaatagttggtaattccacaggactagagttactgatttactaataggataaattgtctcactggatttgaaaccttttacccaaatgccaagttagccctcttgttaagttcttaaatcatcttaaaatcatttctatattaaatatttttgtttcataaacttttgataaaaatgtgcagcatcttaatatttttccaaattatgattattttcttaaaaattgatccttattrtcatactttccagatgtaatttaaggcctagagcaaagaacaaaaacatgtttaagtggagaaatttagccctgacctctattgatttgaagtaccaatttttygttgtttttttaaagatatttcaaggaaacaaagattatcaccaggatgtgcgtaataactttttgccaccaattattgcacgttttattagagtgaatcctacccaatggcagcagaaaattgccatgaaaatggagctgctcggatgtcagtttattcctaaaggtaaagagacagttcgtttaagatatgtttttactggattgccaatttaaaatggttttgctgttctcagagagagtaattaataatgtgagtgtctttctggttaaactctaattacaatatcttcttaaagggatgttaaaaaaaatggttaccctattaaaaagttagttataagaatggtttccaaaattataagtggaagaagaaatagcatcattcataagataatgtaaatgagatcactttccaaatttaatctcaatcctaataattttaaatcaggtgtcatgtactgtaatatttgtttaacataagcatgaaagattgtaacaatacatttaaagcaagaataatttatctcaatattatacattttaatatactgtttacttttgtacgcccaaaggctaccacagtgcctgacacatcgttggccctccataaataactattaaatgaattgaataagtactgtatcaaaatgtggatgactcctttatagctttagcattcaacatcactttccaccccattattcttcttcctaagattattttcagatgatttaattatttaaaaactgagaaatcctggcatatttgtgcctttattgcagagtataatatttatccttccaatatatttctctctgagagttaaaattattctgcagaattaaatactttaggaaatattgaagacatttagcattactatttttaattatgatttttaaaaacaaaatgtttaaatttttctaaaccatttttcaaggtcgtcctccaaaacttactcaacctccacctcctcggaacagcaatgacctcaaaaacactacagcccctccaaaaatagccaaaggtatgcctgtttttaatgtgagaatttgatattccttggatttatggtgcaactttccaaaaatatattaaaagcattatcaaataagtttatgttaatcaagttggtacagattaaaaagtaaagagcttttgaaacttttttaaaggtcgtgccccaaaatttacgcaaccactacaacctcgcagtagcaatgaatttcctgcacagacagaacaaacaactgccagtcctgatatcagaaatactaccgtaactccaaatgtaaccaaaggtatgcaaacatggaaatgaacgcctagtacatagtattgttttgttcttaactgaagttttcacgggcatttttaaaccttcagtttattttcttccaactatagtttttaagtatagcaaaaaaaaaaatttattttctttcataggaaaagactgcattgatctaagttgtagtctctgctgccatgtagaattgctctttaaatatttagagaaggccactgtgttgcaggcctcctcttgtgatttattgttccttacagctaaacatgttgactctcaggcttagaaatacaatattttctagaaataactgaaatcatagcaggaaacaaacttgtttcccttgataatatattaatttgatggatagggaacttgatggcaaaaaggggaaaataaaaacagaacttttagtagaaactagtaattgttaaaaaatactcatagttaacatattcataaaaaaaaactttggtctctttttaagtgtttgcaattatattttttaagatcataaatagaaatttattagaatttactttcaagttttgttatcagtgataaataaggtctcaaaatacataaaacatagtagtcttactagttgttgaaaaacaaaatttcaattgaattcaaaaaagtgtcagtgtcatagtagactaagtatcagagttgtcacataaaaagcttccttgttttcaggaaagtgcagagagagaaagccgttcatccaaagtaatttgtgccacatagaacttcagtcattctcattttttgaaagtttgcctggattcagataactttctctgactttccccatgttggttctttcccatcttctgaagtattttcacaaagatgaattactytctcatgctgcaggtacagctagagagaatcaagggttctcagaggcaggagatctcagcatcttttaactgcttaccagttgtcagaaggcatgtactaaggcagaatcccagaccacatgcctggatggagatcagtcactgaaaagtgttgctcatcttaaaatctgattgcatctcagaccctcaaggctaaaaagagtccttaaataatttccttccagaattaggatccctgtatgcccaaaaagaataasaaagaatgagttggtcttctcagagacctcctgtctcttttttagggggatggtagtatataaatttattttttgaacctaagaagatgttttaaagcctctgattaaatcacacagcatccatctaaacttgattatcttctcttgtctcactaatcttatggaaaaagcacatttaccgttgtgaattctgagtgctttctagtctaagtcattatttctgtttatggacttctccatttttacagccaggctgagagtgatttcatggaaragattatgtcatggtcagatttgtgcctctgtagtttccaggtcctccctcagtggggcccgtggcaccagctggctgaccttctgaaaggctgcagtagctcttctgtctgttctcaactgtagctattttacatattccccttattttcaagcccttcacccagatatcttcacccactctcagttaccgctccaacttcacagagaaagtagggagtttccttccagtgaaactccctttttgtggagcctacaaacctatctgtatcctctgttcactgcagtgaaaagggggcttccttatgttgcccaaggctgattatatcacctgtgccctggttcccctcgatctacctctcagggacccartcttactgattatcctctccccctcctgtatcttcagcctctttctctcttttggatacagttgttttaaggaataaagaagatggtgcaggttagactcattgcagtgtccggctctgagcccccagtaaatatcagcaggtgctgctattatcatcttcatggcaagtagggggttgagcgacaaaggaagaaactaatatcccaagtgaccttaggcagatcattttctatatctgggcccagaattccttatctctggagtgaaattaggggattaaatgatccctaaatctctcccagttccagcattatgctggcttctgacctggtcacacacacatttccaattgactttcttaacaccacattgttaccttcccatatatatatatatgaatgttttgccattatgatgtaacgtcatttcaattgctggattattttctcttgtaaggaggataccatgatttattccctctcatttttgggcatttggattatttccaatttttcactcttaygcagaaacagggagaacatctttaaggatgcatctttttttagtttctgagaataaattctaggaatggaattgccaatagatttttgtacatattgcccaaaaatgccaatcagtgagatagcatcagtttatatttccattaaaaaataactgtttcctggtagcctgttcatcaattagttgttgttttaaatatttgccactttgattagcaaaagtagtattttgttgttttaactttttttgtgttggttgtttaacttgtatttctttgattactagtgaagttaacatatttaatggttacttgtattttttaatgtattactagttaatctctgctgatttttctcttaaatgtttggatttggcttgtaatgccctacaatataataattatttaaagtaactcttctcatatgtagaaaatatattttcccaatttttcatttgtctttcaattttattttagtgatttaaaaatttaggaaaatttcacatctctacacagatggaatgaatagtgtaacaagcttttgtgtatctgcaaaagcttctacagttaccaccacatgcccagtcttgacaaataatgtttatggtatttccgtgaggtagaaaaatgttgaaagatgatgtggttaattttccctagtgatttctgcctttggtgttaatatggcttttgtttgtctgtttttgtctttgtaacttcagatgtagcrctggctgcagttcttgtccctgtgctggtcatggtcctcactactctcattctcatattartgtgtgcttggcactggagaaacaggttagtacataactagttcacctgagtccaaaactaccaaatgtgaagtagaagctaaatrtagaagatgaaaatgtttacctgtttgagagtgagagttaaggtaattattaaaatgaaaatttcatgcttctcctttattcccattaaaaataaataagttcaattccacaatcagttactaagtaccttttttgtatcaagttctgcattatacactgggatatgtacattaatatgaacaatttctgacacatgatagttacatttacttaaagaatgagacacaattcctttctctgaagtgtttagcagggttgactaacaaggaactatatcatgtggtttgatgagttatgaaccatgagaattaactgaagttttttcttcgggaaaggggactcctcaagtttggcttgctttgccttaaaggaattgtagttggctagatagaggaaggtagatgtctttgtttgggatgctgtaagaaaataccataacctgggtgacataaataatagaattgatttctcacagttctggaggctgagaagtccaagatcaaaacactgcagatactatgactagtgagggcctgccgtctggctcattcatcaacagtgccttcttgcccgatcctctcatggtggaagggataaacacgctctctcaggcctttcctgtaagggcaccaatcccattcatgaggactctgccttcatgacctaatcacttaccaaagccccactttctaacgggggttaggatttcaacatatgaattttggagagatgcaaatattcagaccatagcactagcaaatggcccaacctgagccaattgtttgagtgaaggcacagagatatggaatgtaggcaaaatagtgagtcatcgcatgtacgcttggcgtgggagagtcctgagaaataaccatagaggttyagtctgggcctggatcaggaaaggcttttctggaagagagaaatttagatttcattctatagatggaaagtcacttgagtgtcaagcaaagaggtgatattgtcagatgattgtacaaagatggtggcagttttgaagggtagattgaagaggagagaggctgagagacttagcaagatgagttaggaaaccactgaggccaggcaggcacataacacactgattctaggaaagggagaagagatggagtggagatgtttcccagtagcattgacaggatgtatgactagttgtctagtaaggaagaagtgatacaggaggaatctgaggtttctggcttgtgcagttagaccagtagaggtgtcatgagttgagataacacagcaggaaggacaggtttggtggagaatgaaaatgacttcatttgttcagccatgcaacaagtatttgaatatttggctgttaccctrtgtcaagtattgagccatgtgctggggattccagtgatgaaccccaaagcttacagattaggaacggatgcaatgcaaaaaaaactcccagctgtaacaccagccatagaatatatgccatgggaggaagctagkggatcccagcttcatgaacaggctgtctaagcagagacacagcaaattagtatgagaacaatagggaaaggaaaggactttaggaaattccaaagaggagagagtatgatgcatttaaggaacttagcaacaacagtgatagtagtgatgaggcccgcagcagcagaagctaatttttatagaaaattgaatgctaatcttagtcactattctacataattattccaaatacctgtattttctattttcaattttattttagtgatttaaaaatttaggaaagtttcacatctctacacagatggaatgcatagtgtaacaagcttttgtgtatctgcaaaagcttctgcagttaccaccacatgcccagtcttgacaacatgcacctctacgcaaattattctaaatacctgaattaattaatttaatcctcaaaacaatctacgaagcaggcactataataagccccgttttacagaaggagaaaatgagacacaacataaataacttgcctagttatgggcaaataacttgcctagtttatgggcataaataacctgcctagttattgcctagtacatgggcagaggggagttttggaccagacttgagagatcgtgctcttacccactgctrctctgaacacataataaataaagtataactcactgttattaaagcacagggtgtgagggggaggactgaggagtgccgctgttgagagggcagaagtcagacagagcctgaggtcagtttgggatggtgttgaaaggaccctgtggacatccagactcctgaggcaattcgaccacacacctggcgttaaggacacgatctgagctggagaattgaagttactgttaggaacgtagttgaaatcactgatgagtgtggctttatgacaaggagtaaaggagcagataccattaatatgctgtggaaaatagggaggatgagaatgataataaaaacagctgcagcttattgaatccagagctcattctaagcactttatacgtaatgaataagtaaccagaagctttgtcacttatgtgtataaaatcctttatagtacaacctatggctaatattgatgccataaatttgttgtcctagcaatatagggcatctaacttctatttagaaaagatgatttatttatttttttatttctaaatcatgtgatgattagagcattttcagggagaaaggtgtttaatcagtatttttttttatttcttttccattcaagtgtttcattaacatcttcaacactcattatcttttccacaaattttttattatgctgtactttgaaataatgaaataagtatacctacgctttaaaatgaggatgcatttagtatcaaaaatatagtcttatactggagaatgtttcccagtaggaaaagcacatkgcttgggctttttatgaaaaccwcatttgtggtgctcacttcggcagcacatatactaacattggaacgacacagagaagattagcatggcccctgtgcaaggatgacacgcaaattcatgaagcgttccatatttttaattgaccacatagttgaaagtaaagcactcatcagcaaatgtaacagaaaagaaattataacaaactgtctctcagaccacagttcaatcaaacaagaactcaggattaagaaactcactcaaaaccactcaactacatggaaactgaacaacctgctcctgaatgactactgggtacataatgaaatgaaggcagaaataaagattttctttgaaaccaatgagagcaaagacacaacataccagaatctctgggacacattcaaagcagtgtgtagagggaaatttatagcactaaatgcccacaagagaaagcaggaaagttctaaaattgacaccctaacatcacaattaaaagaactagagaagcaagagcaaacacattgaaaagctgcagaagtcaagaaataactaagatcagagcagaactgaaggagatagagacaaaaaacccttcaaaaaatcagtgaatccaggagctggttttttgaaaagatcaacaaaattgatagactgctagcaagactaataaagaagaaaagagagaagaatcaaatagatgcaataaaaaatgataaaggggatatcaccaccgatcccacagaaatacaaactaccatcagagaatactacaaacacctctatgcaaataaactagaaaatctagaagaaatggataaattcctggacacatacaccctcccaagactaaaccaggaagaagttgaatccctgaatagaccaataacaggctctgaaattgaggcaataattaatagcctaccaaccaaaaaaagtccaggaccagacggattcatagccgaattctaccagaggtacaaggaggagctggtaccattctttctgaaagtattccaatcaatagaaaaagagggaatcctccctaactcattttatgaggccagcatcatcctgataccaaagcctggcagagacacaacaaaaaaaagagaattttagaccaatatccctgatgaaaatcgatgcaaaaatcctcagtaaaatactggcaaaccgaatccagcagcacgtcaaaaagcttatccactgtgatcaagtgggcttcatccctgggatgccaggctggttcaacatatgcaaatcaataaacgtaatccagcatataaacagaaccaaagacaaacactacatgattatctcaataaatgcagaaaaggcctttgacaaaattcaacaacccttcatgctaaaaactctcaataaattaggtattgatgggacgtatcccaaaataataagagytatgtatgacaaacccacmgccaatatcatactgaatgggcaaaaactggaagcattgcctttgaaaactggcacaagacagggatgccctctctcaccactcctattcaatatagtgttggaagttctggccagggcagtcaggcaagagaaagaaataaagggtattcaattaggaaaagaggaagtcaaattttccctgtttgcagatgacatgattgtatatttagaaaaccccatcatctcagcccaaaatcttcttaagctgataagcaacttcagcaaagtctcaggatacaaaatcaatgtacaaaaatcacaagcattcttatacaccaataacagacagagagccaaatcatgagtgaactcccattcacaattgcttcaaagagaataaaatacctaggaatccaacttacaagggatgtgaaggacctcttcaaagagaactacaaaccactgctcaatgaaataaaagaggacrcaaacaaatggaagaacattccatgctcatggataggaagaatcaatatcrtgaaaatggccatactgcccaaggtaatttatagatcaatgccatccccatcaagctaccaatgactttcttcacaaaattggaaaaaactactttaaagttcatatagaaccaaaaaagagcccacattgccaagacaatcctaagccaaaagaacaaagctggaggcatcacgttacctgacttcaaactatactacaaggctacagtaaccaaaacagcatgatactgggaccaaaacagagatatagaccaatggaacagaacagagccctcagaaataataccacacatctacaaccatctgatctttgacaaacctgacaaaaacaagaactggggaaaggattccctatttaataaatggtgctgggaaaactggctagccatatgtagaaagctgaaactggatcccttccttacaccttatacaaaaattaattcaagatgrattaaagacttaaatgttagacctaaaaccataaaaaccctagaagaaaacctaggcaataccattcaggacacagacatggacttcatgtctaaaacaccaaaaacaatggcaacaaaagccagaattgacaaatgggatctaattaaactaaacagcttctgcacagcaaaagaaactaccatcaaagtgagcaggcaacctacagaatgggagaaaatttttgcaatctactcatctgacaaagggctaatatccagaatctacaaagaactcaaacaaatttacaagaaaaaaaaacaaccccatcaacaagtgggcgaaagatatgaacagacacttctcaaaagaagacatttatgcagccaacaaacacatgaaaaaatgctcatcatcactggccatcagagaaatgcaaatcaaaaccacaatgagataccatctcacaccagttagaatggtgatcattaaaaagtcaggaaacaacaggtgctggagaggatgtggagaaataggaacatttttacactgttggtaggactgtaacctagttcaaccattgtggaagacagtgtggtgattcctcagggatctagaactagaaataccatttgacccagccatcccattactgggtatatacccaaaggattataaatcatgctgctatagagayacatgcacacgtatgttcattgcagcactattcaaaatagcaaagacttggaaccaacccaaatgtccatgaatgatagattgaattaagaaaatgtggcacatatacaccatggaatactatgcagccataaaaaatgatgagttcctgtcctttgtagtgacatggatgaagctggaaaccatcattctcagcaaactgtcccaaggacaaaaaaccaaacaccgcatgttctcactcataggtgggaattgaacaatgagaacactyggacacaggaaggggaatatcacataccaaggcctgtcatggggtagggggagcaggcttaccagtgaatttactctgtttgctaacttctcttctgtatttttccagaaagaaaaaaactgaaggcacctatgacttaccttactgggaccgggcaggtaactcacgtggtctttgcatctcatttctatcagagggatgtcgctcccctacagggggcagtagtgaaaaaagagtcattctctggcccaggtgaactccccgacactgttagaacaatggcattactcttcagttctcaccatttttacccttctgcaaagtctcttgtaattcctaagtaatgaaatgaaaagtacaaatttcttaaaacaagctctgttctttttcttctggaaaacttgtgtagtttgtcctgtgtatctgtttctcatgaggagaccggctttctgtggcccacgtgaacactgagtaagaaacaaaagactgtggtctccaggacacagtgtgtgtttgtcctctgccatggttattcaccaagtggagtccagcagtttaggaatcgggaggtctcccatgatgagttgtcatcttctgaattgctgcaagtgacaccaaaggggcccccctaccagtttctcacttcccagtctcactactggatcagctcttaggagccaggagagttcactgctgtggctaggatagaaaagggcagctagtgccccagggtagatcttggaaaatattttttgggaaaaatgtaattaaggccacccctaaaatagatactgtatctggctgtactatactaacagtgatttgcctgcatgtgtttgatagagatttctaccatgtactgcttggtgctggatagtctatcacagcaaaaaaaaaaaaaaaagttggattataaaggcaagtttgtagagatatttgttatagaaatggcttaaatgcaacaggatttttctcttgatactactgtttgagatacaggtttttatttaatggtctctttggcttgccgtcacaatgaaggttggtggaaaggaatgaagcagtttcttcctgcaaaagcagtggaccatgaggaaaccccagttcgctatagcagcagygaagttaatcacctgagtccaagagaagtcaccacagtgctgcaggctgactctgcaggtaactatgttgcagccttctggtaccaggcagagggagaaactgcttaggcttgctataaagtgctttgggatttacagttctttgatccctttcatgtttaagaaatgaattgtttcctaaaggtagaaccacttttttaaaaggtgactcttcagagagtcatttctgtatcttggatattctgtctgtaaagttgggacattgatttctaaagactctgggcattatgtatgttaactgaggcttgtggggagacccgagatgttgagaggagagcgggaaagacagaagaagccttacagtgtttatcctcttagcctagtacatacttattttaaacatttcctaatatttgaaaaaaatctctgaaattatttttcaagattaatatttattccagtaactgaatgtttcttttccaatgaaatattctgaaaataattcagaaaggaaatattcagtaaagaaatatgttgtctgtaaatctaaagaacatatgtgaaaattctatatgcaaaattacatgaatgagactttctggtatattattactatgagaagtactagacagtatgtttaattttaattttcaaagttcttacagattaagtatygatggcaacaaaagtatcctaaagaatgtttgcttttagtataatctgcagctgccaccctaaattatgcaatctctttactagtaaaatgacttttctgttgttttgtgatatccacagagtatgctcagccactggtaggaggaattgttggtacacttcatcaaagatctacctttaaaccagaagaaggaaaagaagcaggctatgcagacctagatccttacaactcaccagggcaggaagtttatcatgcctatgctgaaccactcccaattacggggcctgagtatgcaaccccaatcatcatggacatgtcagggcaccccacaacttcagttggtcagccctccacatccactttcaaggctacggggaaccaacctcccccactagtgggaacttacaatacacttctctccaggactgacagctgctcctcagcccaggcccagtatgataccccgaaagctgggaagccaggtctacctgccccagacgaattggtgtaccaggtgccacagagcacacaagaagtatcaggagcaggaagggatggggaatgtgatgtttttaaagaaatcctttgaagatgatgctgctttttacaaagcatcgttttaaagcacatggcctttttttttttaattattagtggtagtaatatatagaatgtattacataactgtcactgaagtggttggggaaaatgtggtgactgaggtacaggaaactactaatcttgccatcttgctttaaggtgttatggtggcacagttactgctcgcctgttaaatttcaaatgtcctgtttgatactactgtagaacactatttttaatacagaaaaagctccctataatgcacttcagagaaattaaaaatcacagagtatttattaccaatgctgcaggtacattaatgaactcgagatggctctgtaagcctgactggcaataacgcayggtactgttcttgaaatacctaatggcttgaaattctagtctgtttgtgaaagatgggtactatcatgatttcctcttctattcctatattcttttctggattttttttaataattagtgatataagcattgtttttattgcagccatatccacttatccatcttaagatctgtagctgggattttctgacttgtaatgagcagggggattgctttttcactttgtgacactctttagagctttaatgcttcacagtatatggcctggtctcatycttgcgtgttccacttgaggccctttggtgtcttgccccattcttgtgtttataaaatgtttgagtatttctgatgagtgatgcttgccttagtctcatgaattcagatcccttcatgtcctttaagtatgctcctcaatgtgtaaacaggaacaactttatgatttgaaagctttaaaggagattcttctcccacccccaactttatttgcaatgggatttttcctaggagagttatgaaaagttgaaggcttctaagggaatactgtaaacatgacccacttatatttatcacagtgaaaggcaaaattattcactcagaagtaatataaattacctctttaaaaagtaaccagaatttgtcctttttggttttatacattcacaaacatatacatttttcttgagtctcaaggtattttatatttttagtcagaaaaaataatttttcatttcagttttccataaactgttacacaaaatataaacctaacgtgtatttttcaggactgcgtgatcgtgcactttgtgtggtaagaggtttgagtagtcctrtatgtcacctagggaacagwcattatagcttmctagcaaatgaatattcatgccttgtttttgatacctcctggcagcttccatgtcaccacttgttcatacctgcccagagctagttttagacatggcaaaatagaaatcatctgtaatttattagctaacaatgtaaaaccatcttttaaagccttcagactgtcaagacgacatgagcagctcaccatatgataaaaatacataaatttgacattccctyttccataaacctttgtttgtagatttaatgttgaacagtacttttccataaagttctagtcacttctgttggcctgagccaccagattatgatgttgccagaattcactcaatttgaataaagatgaacagtatttgttttcttgtttccatgaattatatcagtattctaaaacatcgcttcagaaagagaactgtttatttctgcaggcttcctgtccttttgtggtatggttttttggccttattttcactggcttttccttctccaaactttgaggcgtgatttcattcattgaagaatcaatacatattttgtttcaaaatgtttgaaacaaaagacatagatggtagacttttattaaaacatatatggatgtggaaagcacatatattaatgcagtcatcccttttcaggtgggaagagagcaaaccagttgattttttaattcatccttagtacacagagaatatacttttcctcaagtaatatacctgtttgaagctttaagagagatgtttttggtaactatttcattttcccaaagaagtttgctattcttgtgttaattgtgtatacctgattgttttttcctggaggtttttgttgttgttgtttagttttgggtttttttttttttaagaggggcaagtgttttctgaaatgatgcatattttaagactcgattcatattgccactgtgctatccttgaactaccaataatttttataaaatatctagtttttactacttttatataaactttactttccagatgaagagctgagcstgattcaaatggtttttctgctttatacttctttttagttcattggtttttatagtagaggttttctattttttttttttttttttactacatttatatgtctgatacatatacggctttggagacaatcaagtaacaactgaaaatgtgaaagtaaccatatctgacaaaattcccttgaatttttatcctttgcttgcaacatttaagactcaaagtcactggtatattggattaagttttttcctgttaatgcaattatagaaatacatcggagacacaacaaatgtggccattacaggtttcataaaattacactgacttggctgttacttgatcttaggaaacagcacagtttaagatattgtgaattctgacttatactttattaaatgctrtaaatctaaatagatcctgttggatgtgatgggtctagtccagtttatttaagttcatgtttcactgtttgcactttgcattgaacaatgggtttattcgctgatgtaaacggttcgagtgaagaattaatgcagtaagtatgacaacacatacacacttgcctctccccatctccagaagaggggagcagagtccgagcttatctaaatatgaatgtggccacaaagctgtggaaggtgacaaagcttaaacacctttgccctggctctgcattgtcacctagagagcaagaggtctatagaaacatcatgtcacatgaaacgattctctgctttttggttctgaacttgaagtccctaaactgcaaaatctaagagttgggtggttattaaaatgcttttaaagtyaactgtggcaccaattctaatgtaatccaacttgtgactgtttttttttgttttgttttgtttttktgtgtgtgtgtgtggcactgggaaaagtggaaacaaacatgtattgaaatacatattggaaataaaaatggtttgagcgtcagtgatattctcccagaatgtacttatcttacctcggcatgtactgtagtcactcagtatttgtatatgttgctagaatttagattgtaaaatagtgaaattttaatgtgttcatttgtttttaatgtatatatgtcttgctcagattatttggtttaaataaaacaaccttgaggtttgtagcttttccttatactataaaatgccagattcttctattttaacctcactaatttatggccaatattgtgcttccagcaacatttgaaaatgacactgttagtttactttgactttttctatgaccagcgccatcctttttttaaaaaaataatttcaacttttattttagattctaagggtacatgtgcagagtgcaggttgttacatgggtatattgtgtgatactgaggtttgtggtatgaatgatcccatcatccaggttgtgagcatagtacccaatacatagtctttcagcccttgccctccccgctcccctcgctccccccgccgcagtcctcagtgtctatcgttcccatctttatgtccttgtgtacccacagcaccattctttttgaagcctgatttactttatatcaattgaacttcagcagccacactgcagcctatggctgtgtggtatgaggggaaaatcacactgattgattacatgtgattccagttctggtaccttccttttgcacctcaaaaagttataagaagaatcaaaactgtgggactctgcaaacatatgctggtattcatgtctaatctgggttagatcaactactactgttctcccctttattctgctttataagtaccgcattctgtttctgagccaaatctaatgtatttcaccctttatacaccctctttagagaggcaggttggttgtcagtaatcaagccatggttttccagtgtttcccaattgtatttattggtcaaaagagagtaattctttcttcagctcatacctcttctgacaacttttagttccatccttataacctctatttttctgtttcttcacctctcattcccctacctccagatggcctttggttacatttattaaaatataggaaggaagactagctcaccacatttgtaggattgactggcttgcattggatcagattctctggtgcaccctaggtagccaggcaagctttccatctgaagattagctttaatcatgggaaaatgagatattctttttgtaccatttaaatccaaaaatcccaacttcactttttatattttttagaagacagcctcactctgtcacccaggctgaagtgcagtggcgcgatcttggctcactgcaacctctgcctcccgggctcaagcaattctcgtgcctcagcctcccgagtacctgggactacagcgcataccaccacgcccagctaattattttgtattttagtagagatgaggtttcaccatgttggccaggctggtcttgaactcctgagttcaggcaatccagctgcctccctcggcctcccaaagtgtttgttaggattacaggtgtgagccaccctgcccggcctcagcttgacttttcttaagtgtttacttgttctgttatcttctttacctttcctaatttacttcaagtggaaaaccttcaaaatttaatgaataagtaagtcaggcaaaaaaaaataatgttcaagatttttttttccttcttgagcttgcctagcttagcttcattgtataaagttaaacttcatttctttaaaataatacaaagccatcagagtttagtaattgtattctttctttagttatttacttatctaataagaactttatgtttagcccatttcctttaacttaaaaacaaacactgccttcattgtaccaaattactcttcacaatcatggttcatttaattctgggggttgtcaggagagagcttaattaaaccagtatgaacttagatttccagagccaagtggtttcggcttgccacatcaagccacaatcgtgattttccaccagccatgtttacagtagccaaatatcctcctcaaaatgtcttattgtagtcagaattgttgtggtaaactaaatccttagtaggaagtcatatcccttcaaaaatctaagatgaagtaactataaaaagacgtgtgaaaacacctcagaaaactagcttattttaaaaacaatgcaatcaaaacttattttcctgttatctttacatttcttggttttcataagttaaatatacagtattcacagaaattaagctggtggttatgaatcaccaggcagcaacagacagtatacataattatttgacgagtgcatccaacatattttaaactaaaaattgcagtacaaaaataaaactaacactgttagcatcatcttctgagtctgtagagtcaatcttgagtcaagttgattacgaggtttttttctataatgtccttcaaaaagagctgctctgcagtcacattgtgatacgcgttctaaagaagaaaaatacaattaccatcattctttcccaatctcaaagtattagcagcaccaatggagtactttatatctaaaaaaatccgaataaagaactcgaatgttaagtaacgagttgcatgtacttttaacttttgatagccttttaaattactttccttgctggttcttgtgcaaaagctttccctacagcccactctttccatttcaactctcacataagtaagactccttcatatcaaaccctggtagaccgaatcatggtacaatacaaatctggagaccaaaattttgagttgttcactttaatggaagaagcccctagaaatcagtttaaaaacaaacaaaatcagcctggagataaactattataatgcctggttcagtttaagatgtgttaaaaattactgttctatacatgaatatccaagttttcttcctgaggaagttgttttaatattctgctctttagatgacacttgaaataccacaagtgctacaggaaagtttagggcggaggagaaatcagcctaatccaaagtctgttggggtacctcattcttgaaatacttaagtgcttgtcttacctggtggggacagagggtgggggtgagggacaaaagacaatactaaatctaacctgatttataccactttctcagcttatatagtggggtgattcaaggggactgatttcatgagatatatccatatactttttatcaagtaatatttcaatattaaaagtatacagataacattttaatcccatcacttgtgatgcactactaatttaagttagaattacaaaactaggaaactccttcccagtcaagtaaattacaaatccttagccaggcacagtggcccatgcctgtaatcccagcactctgggaggctaaggcgggcagatcacatgaggccaggagttcgagaccagcctggccaacatggcaaaaactcatctctacaaaaatacaaaaaaaaaaaaaaaaattagccggtcgtggtggcgggcgcctgttatcccagaaactagggagactgaagcaggagaatcacttcaacctgcggggtgcaggttgcagtaagccgagatcatgccagtgcactccagcctgggtgacagagtgagactctcaaaaaaaaaaaaaaaatttaaactaaaattgttaaaaaaaataaaatacaaatcctcactattaatccctattcaagagaagtgtgatccagtatgaaagttggtaacctttttgatcatgaagattctcttgtagggttaaaatattctacaccatcttgtctacttaaaaacaaatgagaataattaagcacagcaatgcaaggtgaatttgtaatatctcaaacacagcaggttgcctgaatttcaatagtgcaaatataatatctaaagtaaggttctgtacttatatgggtttgatgacacttggcaataaccatgaggcccataaattgggatttcatgctgtagtaaaatgatcctggacatgagttctagttacagcccttggtagccctgtaatcaccatcaagccctcaacccttcaaaacgtggtccctcagtaaaatgagtgtgagaagagaaaatatgggctttccatccctcaaagattagtccaaagcatatgtatattacctaaagtacagtatattaccttattcatcaaagacatggtggcattcccatagtagtgcaaaggactcttgaggtcagaaaagttgtatttaaaaccagctaggtgaacttcgtgacatatgtaaaacgccaatgtgatggcaataattcctgttgttgggtgtttaggtttctgggggaggggatgaaaaaaacttttttaagcaaaaggagctacttgttaccaaagcatatttggttggctgaatcatataaaacagggatttctaaacatttaataaggagagaaataactaaactctcattataaggctcaagccccaaagagtatgcatatataccttaactctaaaaaatatataaactgtgattgaaatcttaggaagtctttaaaataaaatatagctgtggtattagcccagaggacaactatccaatgaaagaatactgtgaggcttaaggaagagaatgttgctgtattgttttaaaaaatacaaaaacatgatgagtcaggctccttatggcaaaagcaaagcctgggaattttgaacacgtgtatgaaatataaggacagcttcattcacaaacggatggaatcatgataaaagacttcatataaattcgccttcgaatagctatattttatactcaccatttaaactaactctagggaaaggctaatctagtacttcaatgataaattgtaacagtatctgactagaaaataaatattccaaatgcatacatagcaatatcacaatctcagctgcaccattatacttttagaaagaaaaaccaagcatcctctttccttatcttacatatatcttgaaaaccagtgtgatagatatttgacaagagggtcttggctttcagaaattgtaattctcactgagatggccttcaaagcgaaaaacaagatacatcttaagctttttacataacactttcaataaagtgtttcttatagttcccattgaaattacatatgacttactatgattttgaggaaaagaaaaaaaaatcgaagaagcacaaccaaatcaattccaggaggcaaacttgtccgaaagcattaactgccttcagcataaaattttctttatcctatgtaccattgtaacctaggagtcattcagcctcattgatcccattgctttttccttctccttgccccttttcatgtcttctacttcctttcttcacatcttaagagtccttcatccgtctttataaccattcctttatatagaccagctcttctgcagccatcacccacagaacctatattaccacctgacaaactcttataagaggaataagcactgcagtcaccctgtacccacaccccagcaacagaatagggcaagagaaaaatacgtttacctggttgaatgttgaatttatgacccaactctcaaacaggcagtaagtattgcctagcaatccagttacgtttgactagtaaatttccattcctactctccaagatgagaatttataactttgtatcctgcaacagccctagtcttcttcctaatttgactagttaatctttatttttttaaggaaacaaaagcagtcaaaagagtggcttcatcatcccaactccaaatctaccatcttacctgtatctttactcacatttgcagtgcttattcctcttataatggatgagatgtaacttcagcaacttttcactagtgtatattttatcccatatcacttctcaacaattttacttctgtacttaactactttctcccctcatcatcagtgtttctttctgctgaaccattcccttcagcatatacacagaccaaaaataaaacacgcttcttcgatcctatatcatcttccaactattgcttcatttctacgatccttgttctagcaaaaagtccactaaagatttgttgctgcttgctcatgtcccaggttctcttcaacccaattcaagcaggctttttccttctttcttgttaatatatatcaccaatatgacctccacgtttctaaaaccagggtttattatttacattcaa

SEQ ID NO: 94610 - DNA, 27882 bp, Homo sapiens
ggtagttctcctgctcaactctttgagcttagctgctcccacataggtacacgtagagcggatccctcctaggatgtctcggatggtatgttccacatctcctttaaaaggaacttccactgtctttccctctgaggctcttaaagtaggaaaaactttattatcttctccttctggattccttaagcccagggacttttccacagaccctagcattgagccccggttcaccatgcttctctgagaactgtaccatccccctctcagcagccatgagttctgcctccatactattactaagctcctgggcctccacacatacctgtactcagccacgcccccagcatacttcttcatggccatttcagaactcattccatagaagagcttgtacttcttgccatccctctcgatgagctcaccacctgactcactgtgcccagccagcatgccacccagcatcacgaagtcagctcctgcccctgccaccatcatggaggggggaaagagattaatctggccaaggtgctcacatggccaccctcaaaagcaactcacaccatattctcagtcctgacaatgattccagcgtcttcctccttctgcttccctagctgacccacaatccacgcaggcctgatctgccctggcctctattcctcagtgggtatgatttccccaagatttaaaaaagagcctctggagagtccctgcctggcttttgctttctccttttgctgtttttaccatcatcgtctggtcatttgattttactgtgcccagctaaataagactcatttcatgtgtcccaagagcaaagatccccaactttaatgggagtaatgatctcctgggaagctgtgcaaaatgaaaaatgcagatgtgctgtcccattcctcagagcctatttttaggtatggctggggctcaggagtctgcactgtgcagcaatctaggagatggtcagatggccctggcccacacttggagtctcagatgtcccctgctggctgccccagatgataccatagacttcggagtcactaattcatattatgaaagaatctgaatgacttcctgagcctctcttagcctgaccctagaccctcagaggtgattcatcctcttgtatagaatcatccttctgtgccctcaagctccttaccaaaagccttggccacatccccaggacagctgcaacctccatcctgcaaagtaaggagcactatgaatacaacatggatttcccaagccctcagcgatgtcccaacagcccaactcaaagccaacaagaacccaggaattctaatccatctctgccacctccataccctgcagaaaccccgctcataccctaccctgcccttgagccttactgaaatgatgtggcctttgaggccatgagcagcatctgcacactccatcactgcgctgagctgtggataccccactccagttttcttccgagtagtacacacagagcctaggaagaacatgataagggtaagaatgacgtgctccacaggtgtttgccactgaaggggggtagccagtggccccaatgaaccagcttacctggcccaattcccactttgatgatgtcagccccagaaaggatgagctcttctaccatctctcctgttaccacattccctgcctgagacagagcaattgaaatacagcatccttagggccagaaacaggaggtcatgtattgttacggtatgcatggaccatgactttccaacattattacaaagaaaggataactaggtcccctctactgggccctctgagggcttttacactagccactttagagaaccctgctccctacccatccacccaacaccaagccaaggtaggagtgagtggccaatgtcaccactgaacctagggtaaagccgaggtccatgatgcacttttctaaggcaacaaggtgctatgatcaacagggacacatgaagtggcatggaggagcattcagtgaggcaaagggaactactggaccaggctcacatctgatttacagtagatttagctccccttcctcaagagacccaaacatattctgtccttaagccattctgtcatagaacctgtctggcttcagggaaagggagaaggcatggtagtataggctaaagacccatttgaccagttgattggcttttgatgatcagtagacacacccctcaatgctgcgaagaaaatgaaggccactcttctaaggttgtaaaaagataaatcattattcatgtgacccctttttatgtgactagtatgtgtccatttcagtgggcagatgtctatgtaccacaggtatgtacagtgcacagatgttccatcatggtttggtgagtgacatcagggacatcagatttacaaagactatgaaccaagggtcagagatactacactgaccaaatagacattttcagcttagaactatggataatcatccagtatcatgattaaatgaactaggaatatcataatgcagcagaggagaaatggactgatgtagcaaaacggagtggcaggaaagtggaaagataaaaaggtaccgactgtaatagaaacataccatgatggtgtgctgggggaagcgcttccgtacatcttttacaaattcaacaaagtgttcagagtagccatttgccacatccaggcatatatacttcacctggggaatagcttccaggatctgttccagctgctcaaagtcagaagagcctgtgcctgagctggcagccagatgctgtgggagaaacagagtcattggcatatcagagatgatctggtgggcagccagtgggtcattggtgagtgctggtccccagaaagccaaaatataattgctggaaaactgggataaggaagggagcagggtatgcccagtgttacctcaagacagtcaggattctggccagcaaactcttgccactgaacgaggctatagtgcttatggacagcagtgaagagagagaactggggagaagacaaagaagcatcaaaagggagaaaactttattaaggtctcttttctagaaacagacctattctatctgagggaggacatgattgaagttggggaggaaacaagtcaaagaactcaggttgagctgggatttgagttcaacctttcttctctctacaaatactagtagggctttttaccataagctagtacttgtcagatttcccaccaaagtactgagtgatctgggttggatttcatctgccagcacattcactgcttctgacttaaaaggtgacaagctgctggtgcagtgggacaggcagcagacatgaaagaaccatgaagaagctggatggagcctgtgtttctctgcactgactcagcccctcctcctaaggtaacctagtactaaactatttttggttatgttctcgttcatttaccagcagtaattcagtagatctggatgctcaccaaaggtaatgccttaaggttgataagagctgataaggggctaccctaccctgtctccatctctagtggaaaaaaggacaaatttcctagttggggacatggatcaagctaaaaaatctgtttcattcagtccattttaataaagttcaaggacataatgactcatcaaactcatattctctagctcaacagattgcaaacaatatcccaatactttgaggaaggcattcaaaggccattgtgtatgctggtgtttgtgccttacatgtctacatgcaaacagacaagagacagcagttggctgaaacagcacaaatcttgcaactaacaagaaacccaaggaagtcatgtattagctagcaacaagtgctctacatacgtactcagagatcaacaatatctagctaaagctggtattgaattctgctttctcaacaactctatcatcaacatactgataagcaaagaaaagtcaccataggataggaagtcagcagatgttggagatatactggcagagtgtggcatgatgagcacatcagattacataccaaacttagaaaaagatgtttgcttgcatccaacctttttattacagtaagacttggctcttatctctaaaacctgatttctttacctctcgtcagcaatactgaaagccaggctccacataaagcatcaagacagtccccaaaaaggttcatgtattacagcacgcctgttaactctgcagtcagagtcaccaattctgaactctactggtcagggcagatggacagtgggcaacagaaagattcctaagcagttactgaatggcaataaaaataaagtaaaaataaaactgcataactatcaaccttaaagaaatgacaagacattccacaaagacacagcaatcaaaaatagaaaaaggatatgaagtccttaagactaatggagccacaaacaatagcagaattcatcaaccagggctacatggatcaaccagcagagtgcatatgttctcaaagtgcccagataactctctaccttctcagcaacaagtatagaggcaggtaatagtactgacaggagcagcatcttccatttcaaagtgaacaacttgtatataagaaaaacacatcccatttggggcacatcccagaaactcccaggaacctaggacttaaagaagaggaagattaaaaaaagaatggcagaagtattcttttattaatgaattgttcttattaaagaaaattaataagctgcttctcctaggatcttctagttaggatttttgaatgcttaaactgtagtttctggactaaaacagtgaatgcttaatgtggacaatcgcataactgaagggatgcatgtgactgtgagggggtgacctgggtggtgggaaaagttggcaaggtgtacaaactgctaaacaggacaaaagggaaaattctgttcatatatcagaaatatcggagcagaacttagctttgaatctcactaattcagatggccttttgaacttatcagataaagggcttcagtagtggaaaaaaccgtaaatcagagcatcctgactgctaactgccagagaactgactgggcatgggggtggggatgcaaacacctctgcagtcagctgggctaactggacaccaatagggatggggcatgaggaaagccctaccttacagagaaccttggccatctcaaaggtgcccacagtatccatattggcagcaatgatgggaaccccagagtatgtctgctttgagttccgaaatgaaaaggatcttgtgagatccacctgcagatatgaacaggaaattgaccatttcattaatccaaaaaacgtaccatattaggacaaggacaggcatctttcttggttgtggcccaccgggagcgtggggtcaagaaacagcaagtagagaagcttgctcacctcacttcgagacttaagggtactgcgtttgggcctcaaaaggacatccttgaagtccagtttcacatcgttgtcaatatgaggcatggcgcttagcctcggggtagcgatgaatctgagggctggaaggcaggaagtcataaggaccaatcttcccctgggctttaacgccctgttacggctggtggcctctcttcgcttaagttgtggaaggtcgggcaaaggccgaagtgtggtccctgaagcctgtcacctcgacccatcccgtggctgcgattaccctagggctccatcccaggtactgtttgttggggaggagagctgggaaagggttgtgagagaccctgacggtgcattccttaccccgctacacttccttcttctacccctgcaaagagcaatggggcaagaggctgatttaggggaacgaaggaatgttggcgacggggggcggggagggttcataactagtttccggaatagaggtactcacttcctgttgccttggtccaggcggcagttgaccaaagaccaccttgcttagcaactaacctcgtgcaatcccgctaagccttctgggccacgccaacaggttcctctagttgccggcgagaactactagccgacgaattccagcttcggcggcggcagggcgaggccttctggataacagagttcacgcactgaggttgctgttggatccgagggggttagactacaactcccagggggaaacgggcgggaccgcctcctggcacgatgggagatgtagttcgttctgcccccacttttcgctagcccgggctcgccagggactctcagaatcgcagagtygtcatctstgctgttgctaaactggatgcctcattccaatttacgacgtcactgaaccgaaacgcgggagcaaccctgagcctttccggaacccagtgggggggggggggggggtggagccagacagtgacccggaagtagaagtggcccttgcaggcaagagtgctggagggcggcagcggcgaccggagcggtaggagcagcaatttatccgtgtgcagccccaaactggaaagaagatgctaattaaagtgaaggtgggagcacctccagccttgccaagacgcagtagtactgggctggcagcagtgccttacgggagacgtggggaaggaaaaccacgcctttccctagcctggaggacgctgactgcctcagggctccgcgcgaggggtggtgggaaatagggggacccagaagggctttgagagcggggcccaggtcccacctgacgaccctggggtattttgccatgcctgcttttttgccaggactgtgctatcacccagaatggggtcgcttttgtcgggtctcactgtattcgaacccccgcagtcatagagaaggcctagcagcggcttgactcccccgtctctcagattcttggagtaagcgctgctctccattcttcattcccagggtacctgcttctcccagtccctaacgtaggtcgcctccgagcacagccctaaaatcggggcctcccaagggctagactatgagcctttactggtggttgccaaggtgtggtatctcacccgtcctacaggaaccaaagcggggagtgtgttcagtcagtacctgcctttctgagcctggcatcctggaccagcctcacttccttggctgaggcaggttagttaccgctgccctagttcttggtactagccatggtttccttcatctgcatctctcaactcccgtggtggttcttcaccaatttccagccctcgttagtcctatctgctgtttcctcttttgtgccttcagacagacagagacccccccccccacgcccccctcaaaaaaacaaaactgctgacaagtgaagtctaatgctagtttggcctttttgtagctaagtaaatctatcgttatttcatcagcttcttagcatatttaccgtacataatagtcattcttaaccttctcttccccagtccttccaaactacttcttagctaagatttgaggtctagtattaaaatagtatgttaaagatgattttttttaacgttgagtagcggcctatataagagtcgtaacatcaatttaataggtgaatgggtcactggcgccattaaaaagagaaaataggctgggcgcggtggctcacgcctgtaatcccagcactttggaaggccgaggcaggccgatcgcttgagcccaggagttggagaccatcctgggcaacatggcgaaaccctgcctgtacaataaattcaaaaaattagccaagggtctgggcgcatgcctgtaggcccagctattcgggaggccgagatgggaggattgattgatcctgggatgtcgaagccgcggtgagcagtgatggcaccactgcactccagaccctgcctgaaaaaaaaggccgggcccagtggctcacgcctgtaatcccagcactttgggaggccgaggtgggtggatcacctaaggtgaggagttcaagaccagcctggccaacatggtgaaaccccgcctctactaacaatacaaaaactagccgggcgtggtggtgggcgcctataatcccagctactcggaggctaaggcaggagaatcccttgaacctgggaggcggagattgcagtgagctgagatggcgccattgcactccagcctgggcgacaagagtgaaactccatctccccctgcaaaaaaaaaaaagaaagagagagggggagaaaataggaaataatatagtgctaggtaaggatattgttttatgattttttttttttttttttttgagacagagtctcgctctgtcgcccaggctggagtgcagtggcgccatctcggctcactgcaagcttcgcctcccgggttcatgccattctcctgcctcagcctcccgagtagctgggactacaggcgcctgccaccacgcccagctaatttttttgtatttttagtagagacagggtttcaccatgttagccaggatggtctcgatctcctgacctcgtgatccgcccgcctctgcctcccaaagtgctgggattacaggtgtgagccaccctcccccgtgcctggcctttttttttttttttttttttttttttgagacagagtctcactctgttgccaggcctgaaattttttattttattttatatgtatattacacagggggtgttactagttcatactaatttttagaatggatcactgtcaaaatcttgagaaacactaactgttgaatatttttatttgagacggagtctccctctgtcaccaggctggagtgcagtggcgcaatgtcggctcactgcaacctccgcctcccgggttcaagcgattctcctgcctcagcttcctgactagctgggactacagggtgtgccaccacgcccasctaatttttgtatttttagtagaaacggggtttcaccaggttggccaggatggtatcgatctcttgacctagtgatccgctcacctccgcctaaagtgttgagattacagtcatgagccaccgcgcccggcctgttgaatacttctgttggcttttcaatgcatatgggttctcatgtccactaggtccaaagaagttaagttactaatgctaagtgttttgtacactttttgaaaatttcactccacattaagaaattttatgtcacaacccataaggcacaaaaactttgctatttgtgatatgctctcagactttcaattctaagttgatttcataacccactgatgggttgagacctgcccactgatgggttgagacctgcagtttaaaaagtactgtttgaaaggccaggcgtggtggctcacgcctgtaatcccagcactttgggaggccaaggcgggcggatcacgaggtcaggagttcaagaccagcctggccaacatggtgaaaccccgtctctactaaaaatacaaaaattagccgagtgtggtggcacacacctgtagtcccagccacttgacagggtgaggcaggagaattgcttgaacctgggaggcagaggttgcagtgagccaagatcgtgccattgcactccagcctgggcaacagagtgagactgtctcaaaaaataaataaataaaataactgtttgaacaaaaaaatcaatgctgtgtgtggaaacttgaaaatacagtgtcctatcacctgtggtcttgctaaaatgctgattatgattctgtgggtctaaggtggggcacaggtttctgcatttctcacaaactcccaggtgatattgaatgtctgagagctacactttgaatagcaagattctagattttttctgtttctttgaatccatatttatgtggtacttctctaaaattgccagtcttctttcctgcaacacccttctgccttcaaacaggcctctgtgccccatctctctctatctccccctctcgccccatcccctcttgtttgttgcatttcttaattaaatacataggaaagtagttacacatgagatagctgttaatctgatctgaagaaaatattaatttaaaaaagaaaaaaaagagctgttaattaccatataagtgacattttttattacagttcctttttttttttttttttttttttgagacaggttctcactctgtcgcccaggcttagggtgcagtggtgccatcacagcttactgcagcctcgacctctcaggcccaagcaattctcccatctgagcctcctgagtagctgggactacaggcgtgtgctaccaccatacccagccaattgttttatttttttgtagagatgcggtctcatcgtgttgcccacgctagtctaaaacttctggggtcaagtgatcttcccacctcatcttcctaaagtgctgggattacagccgtgagctaccatatctgacccctttttgaattattattatttttgttttgttttgcttttgagatggagtctcastctgtcgcccaggctggagtacagtggcacgatcttggctcattgcaacctccgcctcttgggttcaagcgatgctcctgcctcagcctcccaagtagctgggactacaagtgcccaccaccatacccggctaacttttgtattttagtagagacggggtttcgccatgtttgccaggctggtcttgaacgcctgacctgaggtgatccacccacctcagcctcccaaagtgctgggattacaggcatgagccaccgcgcctggcctcattttgtttttgttttgagacattcttactctgtcacccaggctggagtgcagtggtatgatctcggctcactgcaacctccacctcccaggctcaagggatcctcccaactcagcctcccaagtagctgggactacaggtacatgccaccacacctggctgattttctgtatttttagtagaggtggggtttcaccatgttgcccaggctggtcttgaactcctgagctcaagtgatccacctgccttggcctcccgaagtgctgggattacaggcgtgagccaccatgcccagccgaatgattcattttcaactgctgtctctgtgtagctgacttcttccatatttttctataagattttacaattaaattcttcctgatttaaatcttgttaccttgtctctatggttctaaaattaaatgcatcatcttctgtcataagccatatcccaatacccatctcgtgtattaatcccatcaatcattcaggtgtctggaatacaattctttagagtcatttaaaattacrtggtccttttataagatctaatttttcacttaaaagctctttctgtttgatttttgtttccatctccattaccctcattctggtctcgggtcttactcatttatatgtttatgtctctgtaatacatccaaccaggttttcctaccgtcatatcccctctaaagtgtagtctaaaccaagacatgacgtacaaaaccataatgtgcaggtcttcctttagcttctttttcattatattactccctaaccccagatccttcattgatttcctcattgcagattactttggcaactgtctttactgtgtgaatcagttttctcattcatgttttttaacatacagtaaaatgcacagttcttaagggtttagttcagtgagtttttgacaatagcatacgttcatgtaattacaaaatctaaacatttgtattcctaccccctcaagagtttcataggttagttttgcttgttttagaactttatataaatggaattattgaatgtacaatttttgtatctggcttctttcattctgcataatgtctaytgtaatctgtggtttattccttcttattactgaatagtattccattggatgaattatatcataatttgtttatccattctcctgttgatgggtgtttgagttatctccagtttctggctattatgaaaaagtcttctatgaacattgttatacgagtgtttttgtaaacatatgtttttatttcctttggataaatacctaagaatgaaattactaggtcatgtggtagatatatgtaactttaaaaagaaactaagggtttgtaccattttatattcccacctgcagtgtatgagcattccagttgctctgtacccttactagacggtacccttgtagcaccataaaaatgctgatgtcagtcatttttattttggctattatagtgttataatgttatataaattaaaacactatatctagtgttatataatgttatctcattcaaggcttaaattgattaacattgattttcattcaccatagcacttagtcattgccccttgtgtttggacaatatagtacttccttttgttttgttttgttttgatttgtttttaatttttaattttttttttttttttttgagatggagtctccctctgtcacccaggctggagtgcggtggcacgatctcggctcactgcaacctccaccttcgttcaagcgtccaccatgcctagctaatttttttgtatttttggtagagacagggttttgccatgttggccatgctggtctcgaactcctgacctcaagtgatccacctgcctcagcctcccaaactgctgggattacaagcgtgagccactgtgcccagccagaacttccttgtatacagccttattctattaattttatgtctaattgtttcttggttgtacatcttcgcttgataaagattgttggcagggctggatcacatttcttttgtatttcctccagtgcctagggcagtatgttaggtttaggttcatcttttttttttttttggagatggagtctcactctgtcacccaggctggagtgcagtggcgtgatccctgctcactgcaacctccacctcctgggttcaagcatttctcctcctcagcctcctgcatagctgggatacaggtgcgtgccaccacacccagctaatttttttgtatttttagtagagacaagttttcatcatgttatccaggctggcctcgaactcctgacctcaggtgatcygcctgccttggcctccygaagtgctgggattacaggcgtgagccaccgcgccctgtctaggttcatcttatacttgtttaaatagcattgaatgtattgtcaggttacagtgtgatatatcaagaatatcttctaaaattgttcaactgctttaaaacaacttcatggacaatttcaaagacatacatcaggaaagagaagggtgtatgcacccttcatccagcttcaaaaattatcatctcatagccaatcttatttaatttaaactcaccaactccttttacctgatttttttaaagcaaattccagctagcatagcatatgttattcmtacatatttcagtgtttttctgtgaaagataaccttttttctaacataaccgtaatttttacatccaaaaatttaactgattgcttactatcatcaaattaccctattgtctctctctctttttttattaacagtttgaatctggatccaattaagatccatacattgccattggtttatgtgttttcaatttctttaaatccgtagattctcctttttcccatttttttcttgttgaatagagtttcctgcagtttgaattttgctgattacattcccatgtttttctttttttctttttttttttttttgagacagagtcttgctctgtcacccaggctggagtgcagcagtgtaatcttggctcactactgcaacttctctgcttccagggttcaagtgattcttgtattctcgtgcctcagcctcttgagtagctgggactacaggcatgcgccaccatgcctgactaatttttgtatttttcatagagatgacattttgccatgttggccaggctggtctcaaattcctggcctcaagcgacccgcccacctcggcctcccaaattgctgggattacaggcatgagacaccacaacgggctcccatgttgtcttttgacgtattcctcttttcctctgtatttcctgtcagctggtaattagatctagaggcttgattaatctttgtatgttcatatgtgagaagaattcataggtggtgatgtggtatgtacttccatcagattgttttgctttctgtgatgttagtcatttcctagatacattgtttcattgggggttacaagctggaggtactctaatattcttgttgcttcatatattagctggaatatttgaacagtgtccaaaatggtagccattagccacatttggctattgagcacttgaaatgtaactagagagactgaagatttgaaattttgattgtacttgattttaattaaatttaaaaactgaaacttagccgggtacagtggctcacacctgtaatcccagtgagttaggaggctgaggtgggaagatcacttgaggccagaagtttgagaccagcctggacaacatttcgagaccccatctctacaaaacaattttcaggccgggcatggtggctcatgcctgtaatcccaacactttgggaggccgaggcgggtggatcatttgaggtcaggagttcgagaccagcatggccaacatggtgaaaccccatctctactaaaaatacaaaaattggctgggcgcggtggctcacgcctgtaatcccagcactctgggaggccgaggcgggcggatcacaaggtcaggagatcgagaccatcctggctaacacagtgaaaacccgtctctactaaaaaatacaaaaaattagcctgggcgtagtggcgggcgcctgtagtcccagctactctggaggctgaggcaggagaatggcgtgaacccgggaggtggagcttgcagtgagccgagatcgtgctactgcactccagcctgggcgacagagcgagactctgtctcaaaaaaataaaaataaaaataataaaaaatacaaaatacaaaaattagccaggcgtagtgacacgcggctgtaaccccagctacttgggaggctgaggcaggagaattgcttgagcctgggaggcggaggttgtggtgagccagatgatgccacagcactccagtctgggtgacagactgagaccttgcctcaaaaaaaaaaaaaatttttttttttttccaaaaaagaattagccaggcatggtggtgtgtgcttgtagtcccagctattcagaatgctgaggtgggatgatactttcagcccaggagttggaggctgcagtgagccatgattactccactgtgttccaggctgggacacagagcaagactccatctcaaataaataaataaataaataaatataaaaaacttttaagtatgtttagaacaagttgggtgtataaatctactttttctattgtaaattatgaaacttaaatatatgtcaagtatttcagatgaaaatttaccatttgaatttttttgtttttctgggttttttttggagatagggtctccctctgtcacccaagctggagtgcagtggcacaatcagcccactacggcattgaactcctgggcttgggcagtcttgcctcagccttctgagtacccagttgctgggactacaggcctgtgccactatgcctggctaattttattgtagagatggggatctcactatgttgcccaggctggtctcaaaactccaagcctcaagcagtactcccacatccccttcccaaagtgttgagattacaggcatatgctaccatgcccagcctaccatctctatttttttttttttttttttttttgaaatgcagtcttgctctgttgcccaggctggagtgcagtggcatgatctcagctcaccgtaacctccgcctcctgggttcaggcgattctcctgcctcagcctccccagtagctgggactacaggcgcccaccaccatgcccaactaatctttgtatttttagtagagatggggtttcactgtgttggccaggctggtctcaaactcctgacctcgtgatccgccccctcggcctcctaaagtgctaggattacaggtgtgagccaccgcacccagccccatctctacatgtgatgtaaatatgaaatacaggatttttaggatttggttagaaaaaacataaaatatattaatttttatattgattacatgtgaataatattttggctatgttgggtttaaaaatattaaaattttacctcttaaagaacttttacaatatggctactagtaaatttaaaaattgcatgtatggcttgtattatatttctacaaggcagtgctgctttacaaaatcttacccttatcaaggacattgttttttaaataatttgttctcattacagcatattcacatttgtggtataaaaaatggaaaatacagaaaagcataataatgtaattaaaatcacccataattccactgctcaagttaaagcattaatatactgtatatacccttccaagctttttggagagcatatagatgcatgtgttgtttttacaaaattttaattatactctatatactataacttttttgttaaattatcagcatattgttaatatattacaaatagttatcctaaacattgtttgagggatttgtaattttttttctatgattgtaccataatttatttaaccctcaactgtttgatatttagattgtgtttctaattttacagtatcaaaaggttgcaataaccattgttgtaggtatacttttggacatagtcatgagtattttcctggaagtattgttgctgggacaccatattgccaaattgctctctagatatatttatgggcctctacagtcgatttcagaaacaaagggccagctctagacttttagaatttacaaaccaataatcctttttaaaaatataaggtccaagcattttgctcttgggagagcagctctaggtcttctctgagagtcttttttcactctttaaaaatttgtggtcgggtgcggtggcccacatctataatcccagcactttgggaggccgaggcaggcagatcacctgaggtcgggagttcaagaccagcctgaccaayatggagaaacccttctctactaaaaatacaaaattagccaggtgtggtggtgcatgcctgtagtcccagctacttgggaggctgagataggagaattgcttgaacctgggaggcagaggttgcagggtgagctgagattgtgccgttgcactccagcctgggcagcaagagtaaaactccatctcaaaataaataaataaataaaaatttgtattatcggccaggcacggtggctcatgcctataatcccagcactatgggaggctgaggcaggtggatcacttgaggtcaggagttcgagaccagcctgggcaacatggcaaaaccccatctctactaaaaatacaaaatgtagtcaggcgtggtggtgcccgcctgtgatgccagctactcaagaggctgaggtggggatcacctgagcccagtatgtcgaggctgcggtgagccatgattgcgccattgcactccatccgggtgagactgagaccccgtctcaaaaaaaaaaaaaaagaaagtgaaataatttgtggacaacacagaattacaaactttttattttgtctttttaaagttaccacaaattgtcaccaccattctctgaaaggacattaacacctgaatatatttagtttcatgaaaatttcacttttaacactgcttttctcattttaccataggctgctgaaaattttcacacagaccagcataggttagggtagaagcttgagaatcactgctgtaatttattctttcatatccaaacaggttaatccaaaggaattgttcttgtatttttggaaacatactagtactaaatcattctccttgttgggaaattttctgagttcttgtttcgtgctgttctatgtgaataccataaggagaaaccatatgttattttgtgagctactataggagtgtacattgggtcccaatactagaccagccagactcaggtaggacggagtacagaaataaaagcacaggctctgggaccagggaatctggatccaatctctacttttgattgcgtagatgtgtttttaacctaaggcttatttttctcatctataaaatggaaatagtaatagtccatatctcataaatactgggaggattaaatgtgatgcatgtaagatgctgatcatagttactgacccttagaaagtgttcaatggctgggcaaggtggctcatgcctgtaatcccagctctttgggaggccgaggcaggaggatcacttgagcccatgagtttgaaaccagcctgagcaacacagaactcgtctctacaaaaaaatcttaaaaatagctgagtgtggtggtgcacacaccctgtagtccttgctacttaggaggctgaggtgggagggttgtttgaacccaggaggtcaaggctgcagtgagccaggatcacaccactgaactccagcctgcttgatacagtgagaccctgtctcttaaaaaaataaaaggaaaaaaatagttttcagtaaatgttagctgtgattataatatgatcatcagtatatttagcccttcaaaaatattcattgactgcttgtgtgtcaaacactaggaaagtttaacacttaaacaactagctgtaattggtatattaatattggaagtattaataaagtacactgggaacaggtctacacatcatacaggaggttttatacattgctggagtgcaatggcacaatctcagctcaccgcaacttctgcctcctgggttcaagagattctcctgcctcagcctcctgagtagttgggattacaggcatgcgccaccacgcctggctaattttgtattttttaatagagaaggctttctccatgttggccaggctggtcttgaactcccaacctcaggtaatccacccacctcagcttcccaaagtgctgggattacaggcatgagccactgtgcccggccaggaggagatcttacatttaaggggtcttgaagtttggagaagaaggggaggatattgcaacaaggaaaataacggaagcaaagaaatgcccataaattagaatgagcatggtgtgtttgtggcctggatcactgtagactaatacagatagagctattaagagcaaggacagatgggagaagacacaacatttatgactgcataatcagtataattattgtatttggatatcaccagcccttaacttacggaagaagacaagagctgcaatttaggatttaggtagaagtctggaaagatatgggagatgtaatgttgacttcttgtcttcttttctcttttttcttttactttcttttttttttttttttttttttttttgcgagggtgttgcccaggctggagtacagtggcacaatcgtggcttactgctgctgcctctaatttctggactcaagtgatcctcccacctcagcctcccaaatagctggtactacaggcatgcaccactgtactcagctaatttttgttgttgttgttgttgttgttgttgttttggttgagacagggtttcgctgtgttgtccaggctggtctggaactcctaggctcaagtgatcctcccgcctcagtctcccaaggtgttgggattgcaggtgtgagccaccatgcccagccaattctagcattttttaaaaaactgctgagatgatttctggtgtccttgagaattcttcaaattatctgaatattaatttctagcattgatatttagaacaaggtccttctgactttttttaagatatctttcaggctgggtgcagtggcttacccctgtaatcccagcactttgggaggctgaggcgggtggatcacctgaggttgggagtttgagaccagcctgatcaacatggagaaatcctgtctctactaaaaatacaaaattagccaggcctggtagcgcatgcctgtaatcccagctacgtgggaggctgaggcaggagaattggttgaacctgggaggcagaagttgcagtgagccgagattgtgccattgcactccagcctggtcaacaagagcgaaactccatctcaaaaataaataaataaatcctttcattgccgtatcatctaaaataatgccaatattctcactgattttgggggactgatgttggaagatgactcatggaattaagaggatcagatggttcaaagaatcttgccctatcaaagttgtttacagcctaaaaatatttgataaatgaaggtatgttcaaagccttctcattctccaaagcagtgctgctgagaatatgcatcttttagaaggcagtagatcccaaagaccaacataggatgttttacctagaagacaaattgtacattgggctttaaggactcatgaaaccattgcctgtttcagacgctgaccggaaaggagattgagattgacattgaacctacagacaaggtgatgcatgcccaactcctcttcatgtacttcttgccatgtgtatttgtttgcatatgcttatgaacttggtccttttgctctcatgctgtctgcatagcccttgttctttccgtttccatggtcctacccctaagcagcagcccctgactacttgtctctctaaaggtggagcgaatcaaggagcgtgtggaggagaaagagggaatccccccacaacagcagaggctcatctacagtggcaagcagatgtgagtttggagtgagaatgacagcatggcgatcttatgtgaagatgagaagaggagagggggcacgtactgaggtggatcaggggtgcctcttgtttttggtgcctaagactctttggcaatctggtgaagcctctaagccccttctcagaataagattttttcaggcataaaacaaaatatatagaattaaaggaaaactaattatattgaaatagttattaaaatactaaaacaaatttgtgatatagtaatatatgtacttttttattaatgcataagatctaatggtaggtctaatatgaccataattttgaaatattttcaagatacctataaatgatcatgatagaaaatagttaattgctattgttaacaagttacctatattgctaatactactgtggtttttgggctatgtttaaagttagaagaaatgttaaatttcagttgggggttagtaaaaataaagatgggattttttttctcattcaagttcacagacccccaaagagatccaggaaactcaagaactcctgttctggccgggcgcagtggctcacgcctgtaatcccagcactttgggaggctgaagggggtggatcacctgaggtcaggagttcgagaccagcctggccaacatggtgaaaccccatctttactaaaaatacaaaaattagctgggygtggtggtgggcgcttgtaatcccagctactcrggaggctgaagcaggagaattgcttgaacccaggaggtggaagttgcartgagctgagatcgtgcyactgtactccagcctagatgacagagcgagactctgtcaaaaacaacaacracaacaacaacaacaacaacaaaaaactcctaagtcttctttttcttttttttctggcttccttttcctgcaggaatgatgagaagacagcagctgattacaagattttaggtggttcagtccttcacctggtgttggctctgagaggaggaggtggtcttaggcagtgatggaccctccattttacctctttaccctgtcgctcataatgaggcatcatatatcctctcactctytgggacaccatagmcactgccccctcccctggatgcccagtaatgtatgtctactggtgggagactgtgaggatcccaggattcagtattcctggcccagagggcccttgctggctactggrtgttagtttgcagtcctgtgtgcttccctctcttatgactgtgtccctggttgtcaataaaatatttcctggcctcctggaatctttcttctgttgcacaagttgactgaaataaaaatggacctaatgctcactcagttatagcaggctgaaggaatcggacagtggaaggaatggtgctcttacggggattatcagactctaggaaaacctacttagtggtgtgttggaaccagttcctagtggctaatgagagccaattattggcacctttttccaactctattaagtgacttcatgttggtagcttgaaattggccatggtaggattatttacagaaactagcaaacactacagatcagttcctccccacaaactggttgttatacatctaccagtgtagtgctgacatggatggtgaaaccttcggagagtgaattctctcttgactgtggctgtactggacatttaggcctggttggagaacgccttcaagggtttggctgacactgtactctatggctggaatattactgaggactttgggttctacactgtcaggaggttgataatgcagaaagattgagtgacaagctgtgatgtatcacttgggtctcaagaagaggcaggtgctagaagaaaaggctttccttcttccctggcttcttagtataatagaatcgggcaaggctgggtggagtggagaagtagggaggatgcccgtggccaatgccttagaaagacttgactgctgtggttgcatgtgtggtcgtgttggtacctcgctgcaatcctcttccccgcccagcatcagatggcactcttgcgccatctccaggctgatgacgccccgagtggcgacgctctagtcgccatttgtctatggcaggcagggtggctgccttagctgccggaggttccgcactctctaaggccccgggtgaagccccacctctgctgcgcgcagcctgcggtgcgggtcatggcgcggctaccgaagctggcagtctttgatttgggtgagggacgggaaggggagaatttcgtaaggtgctctccttttccacatccctaacagcagctcccgaatccctgcatctcccgccccaggctgaaccttccctctccttcctctcgcagattacactctctggcctttctgggtcgacacgcacgtagaccctccgttccataagagcaggtgaggtagggacagggaagactgggggcgagataggacccagccagggctgagcgcactcttgccctctccagtgatggaactgtacgagataggcggggccaagacgtccgactgtacccagaggtgcctgaggtcctaaaacgattgcagagccttggggtgcccggtgcggctgcttcaaggtaagaagagcgactgacaactgacagtgtaatgctgaagggtgcatgcaagagacagtgaaacccctggtctacaaaaataggggcggtgcaagtttccaagtatttacatattttttcccttgaacgctctcctgtgccttttaactattaaaaagtggggccagcaggcgggcgcggtggctcacgtctgtaatcccagcactttgggaggccgaggcgggtggatcacgagatcgggagttcaagaccagcctgatcaacatggtgaaaccccgtctctactaaaaatacaaaaattagcagggcgtggtggcacgcacctgtaatcctagctactcgggaggctgaggcaggagaatcgcttgaacccgggaggcggaggttgcagtgagctgagatggagccactgcacttcagcctgggtgacagagtgagacaatgtctcaaaaaaaaaaaaaaaaaaaaaagtggggccagacacagtgactcacacctgtaatcttagcattttgggaggcctaggtgggaggatcacttgagcccaggaatttgagaccagcctaggcaatagagggagaccctatctctaccaaaaaaaaaaaaaaaaattgtagtggcgtgcacctgtagtcccagctacttgggaggctgaggtgggaggatcacttgagcccaggaggtcgtgaccacagtgagccgtgattgggccgctgcactccagtctgggcaacagagctagaccctgtctcaaaacaaaagctaaaacattggcccagcaccaattgtgtcaaataggaaggcaatggagttaaacagaggctgaggatgcctgtccatcccggaaaaacagcaagttgatttccctggttatacttactaactttgcttaataagttaacgtagccctggcccttcactttgctaatcccatcttttacaccgttttgcaggacaagtgagatagaaggggccaaccagctactggagctctttgacctcttcaggtactttgttcatcgggaaatctatccaggcagcaagatcacacactttgagaggtatgcggagataagggaggagcagggtgagaaagtatcagagaggcctgggaaaccaagatactagcttggttactcctgccctgtcttgaataggttgcagcagaagactggaattcctttctcccagatgatcttctttgatgatgagaggcggaatattgtagacgtcagcaaactgggtactgagtgatgaggaacagccatttggggtccctaggagggattaggtagatacatacaggttggatagtttgccctataggtggcactcacaaaggtcagagtaataatggagaaccctgaaagcttaatgaaatgtgacttcttatctttctaggtgttacctgcattcacatccagaatggaatgaatcttcaaactctaagtcaagggttagagacatttgcgaaggcccaaactgggcctttgaggtccagccttgaggagagcccatttgaggcctaaactgaaaggaaatcaagaaggcattttcaggtgcatttgtaatttattaaagttcatctgtgtgtgacagaagagattttacccacagtgtggggagtttctatttttctagcctgtgaaatggggttggttgtcctgaggtgcagagaccagaatgtgagacattagactgcatcaggtttgccatctaaacttagggcaaccccaagtgcttgaacctataccaccccactttcctgagctctgtaaagagcatgaagttttcccactgaccccatacactgaggtgccatcacactgcacatttccttccggagaacaagcacgtactcaggtggagatagaactgtctttttacttaatagaaaatgatgtggcagctttaagaggagcgcgtcggtctggggctggtggcttgggtcacgtgacaccggtggtctcgtttgcgcctcttgatgtcgcggcggcgccctgaggacggattgggcaaggctggtccctgtgtgatgagacatcaccctcccaggagcaaggcggaagtctggaggacgctgaggggcggaggcgggagaggcgagctcgcgatgagtggtctcggcaggctcttcgggaagggtgagccagggtgggactggccagccaggaggcgctggctggtgcaggggaagaggagaccccggcgagattcggccggaccgctgcgccgggcaggggaagagaatcaggagacaggctgactggaaaaccccggcggccgatggcggagcaaggctcatcgccggtgccaaaaggcacaccatgtcggggcgccttgttcccgtccgccgtcctcccccactctcagagggaagaactcaagatctgggaggggacttgagttgagggcgtggcgatcgtgctgactcccactgttcaggcttgaagacgagtttcctgctgtcttcagccattttcaaaaccttgttctataatactttgtgctgggcaagagggatctaaggtgaagaagaaagactgccttcttagcccggcgcgggggctcacgcctgtactcgcaacactttgggaggccgacgtgggtggatcatgaggtcaggagtttgagatcagcctggccaatatggtgaaaccccgtctctactaaaaatataaaaattggccgggcgcggtggctcacgcctgtaatcccagcactttgggaggccgaggtgggtggatcacctgaggtcaagagttcgagaccagcctggacaacatggtgaaaccttgtctctactaaaaatccaaaaaaaaaaaaaaaaattagctggttgtggtggcacgcgcctgtagtcccagctactcggggaggctgagacaggtgaatcgcttgaacccaggaggcggaggttgtagtgagccaagattgcaccaatgcactccagccttggtgacagagggagactccattctcaaaaaaaaaaaaaaaaattaggtgggcatgatggtgtgtgcctgtagtcccagctactcggggaggctgaggcaggagaatcgcttgaacccgggagacggaggttgtagtgagccaagattgcaccaatgcactccagccttggtgacagagggagactccattctcaaaaaaaaaaaaaaaattaggtgggcatgatggtgtgtgcctgtagtcccagctactcagggaggctgaggcaggagaatcacttgaacccgggagacggaggttgcaatgagctgagatcatgccactgcactctggcctgggcaacagagcgagactctgtctcaaaaaaagaagtcctggcgcggtggctcatgcctgtaatcaaaacactttgggaggccgaggcgggcagatcacctgaggttgggagttcgacaccagcctgaccaacatggagaaagcctgtctgtactaaaaacacaaaaaattagccaggcatggtggcacatgcctgtgatcccagctatttgggaggctgaggcaggagaattgcttgaacccaggaggcggaggttgaggtgagctgagatcacgccattgcgttccagcctgggcaacaagactgaaactctgcctaaagaaaaaaaaagaaaggcagctaggaatagtaaaaagaatattggttttagaactcatactgccacatcttgattcctgcacaatctcttattagttgtgatttttaacatctttgtggttgttttcacatttttaaagtgaagagatagcacgttcattgtagagatttggggattagcaataacacagtcaggtctctagcacatactatgtattcaatgattggtggctaatatttttccttcacaaaatttgggcctactccactggactcctcagggaagaaggagaaagggccaacccctgaagaagcaatacagaaactgaaggagacagagaagatactgatcaagaaacaggaatttttggagcagaagattcaacaggagctacaaacagccaagaagtatgggaccaagaataagagaggtaatgagggaaacaagcctatggggagggcccagatgggaagcaggtgcttctgactcttgatgttcagggtatgggctgggtcagctgccctacaggctttgcggaggaagaaaagattcgaacagcagctggcacaaactgacgggacattatccaccctggagtttcagcgtgaggccattgagaatgccactaccaatgcagaagtccttcgtaccatggagcttgctgcccaaagcatgaagaaggcctaccaggacatgtgggtacggggggaggggtggaggggacccaggcactgggaagagtggcttgctatcacactttaaactttaaagcctctcagaatgtgaatttgcagtatagatacttgtgatggctagacatccatctgccccttgcttcctataaaattctttcgctgcctggggcattctagggaggaaagatgccttctctaattctttttttgttttgttttgttttgttttttgagatggagtcttgctctgtcgcccaggctggagtgcagtggcacaatctcggctcactgcaacctccgcctcctgggttcaagtgattctcctgcctcagcctcctgagtagctgggattacaggtgtgcactactgtgcccagctcatttttgtatttttagtagag

SEQ ID NO: 94611 - DNA, 30070 bp, Homo sapiens
tggcttgagcctgtgaagtggaggttgcagtgagccaagatagcgccactgcactccagcctgggcagcagagccagaaactgtcttttaaaaaaatttaaaaattagccaaatgtggtggttgccacccgtagtcccagctatttaggaggctgaggcaggaagatggcttgagcccaagaagccaaggctacagtgatctataatagtgacactgcactccaaactgggcaatatggcgataccctatttctaaataataataataataatgttcaccctcaccacttcacaggatgtgataaaacacatggcttagcccctggcacatattaagggctcagcaaattgtcactgttattattagaacaatagagttctgtaatgcagtaataacaataatgaacatattgaacacttgcactgtggtcagtacttcatgtaccttctcttattatttccacaaatttaattccctaacagttggctattattacacctattttacagaggaggaaactgaggcacagaggagttgatctatttttccaaggttacacagccagttagtatctaggattcaaacatagatgatagggccaggcgcggtggctcatgcatgtaatcccagcactttttggggctgagatgggtagatcacctgaggtcaggagttcaagaccggcctggccaacatggtgaaaccctgtctctaaaaatacaaaaattagctgggcgtggtgtcacacacttgtaatcccaggtattcaggaggctgaggcaggagaatcacttgaacctgggaggtggaggctgcagtgagccgagatcatgccaatgcactccagcctgggagacagagcaagactccgtctcaaaaaaaaaaaaggtgatagaatatttgcattaatggggctgggcacagtgggtcctgcctgtaatcccagcactttgggaggccgaggcaggcggatcacgaggtgaggagttcgagaccagcctggccaacatggtgaaacccggtctctactgaaaatacaaaaattagctgggtgtggtttcgggctactgtaatctcagctactcaggaggctgagggaggagaatcgtttgaacccaggaggcgcaggttgcaatgagctgagattgtgccactgcactctatcctgggcgacagagtaagactcattctcaagaaaaaaagaagaagaagaagaagaaaaatttaaagtggagggggcaggcacagtggctcatacctgtaatcccagcactttgggaggccaaggcaggcggatcgcttgaggtcaggagttcaagaccagcccggccaacatggtgaaaccccatctctactaaaaatacaaaaatgagctgggcatggtagtgcatgcctgcaatcccagctactcaggaggctgaggcaggagaatcgcttgaacctgggaaggcagaggttgcagtgagccaagatggcaccactgcactccggcttgggcaacagggcgagacaccatctcaaacaaaaataaaaaaataaaaataggccgggcacggtggctcatgcctgttatcctggcacttagggaggccaaggcgggtggattgcctgagctcaggggttcgagaccagtctgggcaacttggtgaaactccatctctactaaaatacaagaaattagccaggcatggcattgtgcacctataatcccagctactcaggagactgagacagtagaatcgcttgaacctgggagacagaggttgcagtgagctgagatcgtgccactgcactccagcctgggcgacagagtgagaccccatctcagaaaaaataaaattaaattaaatgaaaataaaaaaatagaaaacaaaaaattatttaaaaaaagaagaaattggccgggcacagtggctcacacctgtaatcccagcactttgggaggccaaggtgggtgaatcacctgaggtcaggagttccagaccagcctggccaacatggtgaaaccccgcctctactaaaaatataaaaactagccgggtatggtggtacatgcctgtaatcccagctactcaggaggctgagacaggagaattgcttgaacccaggaggcggaggtcgcagtgagccgagatcgcaccactgcactctagcctgggtgagagagtgagactccatctcaaaaaaaacaaaaaaaaagagaagaaatttaaagggttaagtgacattagatgtatctcctttaccttctgggcccccaggcctgattctaagactaacggctgggcgtggtggctcacacctgtaatcctagcactttgggagtctgaggcgggtggatcacgaggtcaggagttcaagaccagcctggccaacatggtgaaaccccatctctactaaaaacacaaaaattaggtgggcaaggttgcaggtgcctgtaatcccagctactcaggaggctgaggcaggagaattgcttgaaaccgggaggcgaaggttgtagtgagccgagattgtgccactaaactctagcctgggcgacagagtaagactccttctcaaaagaaaaaggaaaaaaaaaagactaacaaaggaggaagttgggagatcaatgtcctcaaaagacccagacaattgccaacccactgaattctaggaaggcagggtctaagtcttggtcagtagagtgagtagagtggaaattgtcccttagggggacacattgaaatcttttttttttttctgagacaaggtattgctctatcacccaggctagagtgcagtgacacaatcatagctccctgtagcctccaactcttgtgctcacgcgatcctcccacctcagcctcctgagtagatgggactagaggcaagctccaccatgaccaggtaatttttgtattttttgtagagagggggtctcactatgttgctcaggctggtctcaaacatctgggctcaagctatttgcccacttcaacttcccaaagtgctggggttacacatgtgagccactgtgcccagtcccaaatccatttttgttcttccctccttccatggaaaagtgaaagtgagcacacagctacctaccacctgtgtgaccttggctgaaatacttccactctttgggccttagtttgttcatctgcaaaatagtaatgatggcccggcacggtggctcatgcttataatctcagcactttgggaggtcaaggtaggtggatcacttgaggccaggaattcgagaccggcctggccaacatggcaaaacccggtctttactaaaaaaaatacaaaaattagccaggcgtggtggcacgtgtctgtagtcccagttacttgggaggctgaggcaggagaatcgcttgaacctgggggatggaggttgcagtgagctgagattgactcactgcactccagcctgaatgacagaatgaaactctgtcacacacacacaaaagggtaggccaggcggtggctcacgcctataatcccagcactttgagaggccaaggaggtgggtgggtcacctgaggtcaagagttggagaccagccttaccaacatagtgaaaccccatgtctactaaaaattcaaaattagccaggcatggtagctcatgcccgtaatcccagctacttgggaggctgaggcaggagaactgcttgaagtcgggaggcagaggttgcagtgagccaagatcgcgccattacactccaacttgggtgacaagagtgaaactccgtctcaaaaaaaaaaaaaagtaatgataatcgtacccgtttcttagcggtgtttgaagaggtaagttattaatgcagggatcatggtatctggtacactgcaagcccttgatacatgttccttgctattattcttcatcttttcctcacacatctcagcaaatcgatttgcctcttctggagtcagacagaaatgagttcaagttccgctttattcttgctgtatctttaaccgagtatctttaacttggcctttctgtgcctcagtttccctccctgttaaacggtggttacagctgttttcttcagtggaagacacttagagatggggaggcccttagcactcctgttagccctctggccaggccgaggatcagctctggccataacgcgattgaatgggaaggaagggagcaggtaatagggaagccgggaaggggtgtcctgcgagcctccccccaacaccccccccccccgcaaaggctggtggggcgctgggctgcggtggcatcagaggctttaacccttcccaggccgcgcctctctccctgcggtccagacactgcgcccaaggagggggcctgggaaggacaaggcctgggggtaagacccacgcgtggcgcggaagctagaccgggtgggggggttgtgggctcgtcctgccctcgaccctttgcctccctccagccggggagacccggggctccagccatgccccgtgcgcgcggaggagggatgctcgccaggtggggacatacttgggggaggggctgtcggcccccatagcagctcacctgggcccgcggccgccagcgtcgctgtctccgctgctcgccgcgaccgaccgccctccctgtcggcgtccgctgcccggcccggcccggcccggcccagcccggctcagctcggccccgccggcccgcggctcagccagatccgcatgcgccgccgcgcctccctctctcgcgccgccgccgcgctcagcgcgcccccgggaccccctcccgcccgcggtccccgcgccccgccgcccgaggcccacgcgcagtcacacccggccgcggcgtggggtgcacggctgcactcgcgagggcacggcggcgtcacgcgctgcacactcccacggggtcacgctcgccacgctgccatactcgcgggggcctcggcgcacaaactcacccccgcatccacgcgcttgcgcgccgtcactccctcctgtggggtctcacggggtcacaccctcacgccgtcacacgcggcgtccacactggaacggtgtcacccaccaccacacaaatccaatagggtaaccaccgcccacgcggcgtcacacacaaatgcacctgtcacacacagccgcacactccccggcagtcacaaacagtgtcataggcccacacatcacgcacagcttcacagccacagtgtcacacactctacacactcgaaccttcatagcagtcgccccgcacatgctgcaccgccgcacctcacacatcatagtcacagggggtcacaatgagcagctcaacacagacacccacagccacacactcgaatggggtcccggtgtcacacatccttacacgagacatgtggtgtcacacactgtcacagtctaattagtctcacgcttccatgtagcacacctcacacgtcccacaccctatcgtacaggctgacgcagtgtcacccacggtgtcaccacaaggtcacaaaagaacagaatcaatgcctgccacacgtggtgtcacgcacgtgtagtcacactgtaacacgggatcacactcagaggatgacacaaggtgtcacccacagtcctgcttgccctccgggtcactgagtcacacagggtcatataagtgcataggtacgccgtgacacagtgtcttacatccaagtgcacacacacactctgtcctcctaactttctccccttgctggttctgggaggccctggggcttagagtgcgccccagatccgctccaggctccgggagagggggcgtgagctacgagaggccgtgggtgaggctcgcctggccccgcccctctccgggaggtggagcgcggaggcagggcgctgagtgacaagttatctcggctccgtccactctatttgttgctatgtggaggcgtggccttctgtggccccgccttccagtctaagtggcgcgcagagagggcggtgctggacggtgagcgaatgcaagctgacgcctgccccgcccatccgcgttaggccccgccccttgacctgagccgcgggcggagagtctgaggcgtggcccttcgagccagctccgccccgttgttcctggcttgagtagggcagagagcaccgcccagcagccagygggttcccgcgcgtgccgagactctgaggccttgcacccccacgatcccgtacgatggccgtcaagaagatcgcgatcttcggcgccactggccagaccgggctcaccaccctggcgcaggcggtgcaagcaggcatgagccggggcgggcggggcatgtcacgggacagacgggcagaactttaggaaggggcaccatggggtcgggccgaggctgattggggccatgagcgccccagccaggtgtatgaggactcaggggccaaagcaagtggccacgggggcagaaatggggaaagatgtgagatccaagtttatgtgagtccaagccagagaggaattggccccgggagccccgggaggactccactggcacagtcgtgtgtaagtccrgggctcttatgcaatgcggttgtcattattgtggttgtggtggtggttgttcgcactcccagagaggatttactaagccaagcttgctctgtcgtctcttcacatgagagctttcaaaatggggtgggaactagtatcaccctacttgacagatgagaaaactgagacccagagagtgacttgcccaatatcacacagctgttaactgacaggactgggatttgaactcagctcatgctcttaaccaccacaagtccccaggctggaaactgaaaaagttggggggtcaggttgctgcgagtacctaatgggaaggagtcacagagagacatgagtgaagacttggggacagcagtcctgggaaagtcaatgagggctgaaaatttggagttgccccaggagagagggcagaaaaggggataaccatcccccagcactccctgcccccacagcccagacttgaccaactcccagctgggcctgggacttccagatatggggccccacccttgcaggccttggggacgctgaagatattgactatctgcgtgccccaaaagggtggaggccaacaggaccccactctgctgtctcccttggagggactctgaaagttcttctctaggtccataactctccccttccccagggagaccacgtgaggatcttgacttgtggagaatggggagctgtgggcctctcagtaaaaaccagtttgctgataagcatttattcgggagtaatggagaaggaagtaagagagagaagttgagaggcgctgagtcacctggaaatccactaattccaccgaattccactcgcccaccctgctggtcatagctgggactgcactcagagggttaagaactggagcctagggagcttcagagctgtggctctgaaaaatctcttcccagctctcagctttgctgtccccctcagcaaagggaagggctggccaggcacggtggatcatgcctataatcccagcactttgggaggccaaggcgggaggatggcttgaggccaggagtttgagactagcctgggcaacgtagcaagaccccatctctacaaaaatacaaaaaaaaaataaattagctgggcgtggtgatgcatgcctgtagtcccagctactcagaaggctcaggtgggaggattgcttgagctcaggagttcaaggctacagtgagctgtgtttgcaccactgcactccagcctgggtgacagggtgagaccctgtctctaaaatttaaaaaaatacataaaaagaaagaaaaagaggctgggtgcggtggctcacgcctgtaatctcagcactttgggaggctgaggcaggtggatcacgaggtcaggagttcgagaccagcctggccaatatagtgaaaccccgtctctactaaaaatacgaaaaattagccgggcatggtggctggtgcctgtaatcgcagttactyggcagactgaggcaggagaatagcttgaatccgggaggcagaggttgtggtgagccgagattacgccactgcattccagcctgggcgacaagagtgaaactctgtctcaaaaaaaaaaaaattagctgggcacagtggtacgtgcctgtaattccaggtacttgggaggctgaggcacaagaatcgcttgaacctgggaggttgcagtgagctaagattgcatcactgcaccactgcactccagcctgggtgacacagcaagatgaaaggaaagaaggaaggaagaaaaggagggagggatggagggagggagggagggaaggaaagaagggagggaaggagggagggagggagggagggagggagaaggggcttggattaactggagttcacaatggttctgtagggccaagagtcttaacaggcatgaactctggtgccagcctgcccacattcaagtcaccagctctgcggcttacagcctttgtgaccaaatgccttgtcatctgtgtacctagatatgtgtaagatcatgacaaaactggtagtacttgccctagggctcttgggataattaaatgagatcttatataggargtacttagactagcattgaattttgcagtctctggatcagacttacttaggtaaaaattcaaccttctctacctactagctgtgtgatcctggcccggttgcctaaaattgcctcagtttccccatcaatgtggacaggataatgatacctaccttgcagggttgttgcaacctgatgcttctcaaactgtgagttacaatgagatctgaaacatatggtcacaacgtgtatcaacaatatagggtaacaaatgatgacatagtatcaaaatgtatcacatgttaagtattagttttgtgaaactcattttaattatatatgtatgcgtttgtgtacaccaggttaggcaatgaaattttttgtattgatggctgattttttttttttttttttttttttttgagacaagagtctcactctgccgcccaggctggagtgcagtggcacaatcttagctcactgcaagctccgcctcccgagttcagccattctcctgcttcagcctcccaagtagctgggactacaggcgcctgccaccatgcccagctaattttttttgtatttttagtaaagatggggtttcaccatgttaaccaggatggtctccatctcctgacctcatgatccgcccgcctcagcctcccaaagtgctgggattacaggcgtgagccaccacgcccggccaatggctgagattttcaaaaagcttaaaaagaggccaggcaccatggctcacgcctgtaatcccagcactttgggaggccaaggtgggcggatcacaaggtcaggagatcgagaccaccctggctaacaccgtgaaaccccatctctactaaaaatacaaaaaattcgccgggtgttgtggtgcacacctataatcccagctactctggaggctgaggtgggagaatcgcttgaacctgggaggcggaggttgcagtgagctgagattgcgccactgcactccagcctgggcaagagagtgagacttcatctcaaaaaaaaaaaaaaaaagaatgcccatattggcccatgcaagcccctgctgctcccccatgtgtgagggcagcacagatcttgtgtcattcccctatgaaaggtggtcacatagcacggggaggctggtgctgtgatcctcacttcagagatgaggaagctgaggtccaatcacggaagaggttgcatgaggttcctcagctggtaagtggcagagctggagtttggatcaaggtccctggggcagtaatgcctgtgcttttgtgtttacaaaggttcagggagatggcagaaaacatgacacagtccctggacccacagggtgcttggtttgctgcaggtcagcataaagagggctgtgacagaggaagtacaagttactggggggaccgggtaaagagggtaaagggtgttccaggcagagggcacagcacgtgcaaagtccaggaggcaggaagcagcaccatgcatttgaggaactgaaagaagagcagttggggccgggtgcagtggctcatgcctgtaatcccaacactttggggggctgaggcaggtggatcacacagtcaggagttcgagaccagcctggctaacatcgtgaaaccccatctctactaaaaatacaaaaaaattagccaggcatggtggcaggcgcctgtaatcacagctactcaggaggctgaggcaggagaatcgcttgaacccatgagacggaggttgcagtgagccgagactgcaccactgcactccagactgggcaacagagcgagactccgtctcagaaaaaaaaaaaaaaaatgtgctgtgggtgaagagggcagaggcttcagcagagcctggagaggagaagccagatcccgaggggcctggaaggctggcatgaggagcatgggttttatcacagggcatttcaggcttgcgggaggcaactgagcagagaggcacttaaatattactgtggagaactctgtctggctgctgtgtggaatatggattggagagggcaggactgggtccaggagcccagggaggacccaggaaagggaccaggaaggagacgtaggcctggatcaggccaggagataaagttgcaaaatggttacaaggtgtaataggccacgctcggtagctcatgcctgtaatcccagcactttgggaggccatgccaggcagattacttgagtccaggagttcgagaccagcctggccaacatgcaaaaccccatctctttttttaatttttttattgtgtctttttgggttttttggttttttatgtttattgttgttgttgttgtttgttttgttttgttytgttttgtttgagacggagtttcgctcttgttgcccaggctggcgtgcaatggcacaatctcagctgactgcaatctctacctcctgggttcaagcgattcttctgcctcagcctcccaagtagctgggattacaggcatgcaccaccatgcctggctaattttgtatttttagtagaggcggggtttccctgtgttggtcaggctggtcttggacttccaacctcaggtgatccacctgccttggcctcccaaagtgctgggattacaggcgtgagccatcgcgcccagcaccaggtaactcttatttctgtgccaggtagtagcctaaactttttgttaatttaatttaatttaatttaatttaatttatttatttatttttgagacagagtcttgttctgtagcccaggctggagtgcagtggtacaatcatagctcactacagcctcagccacctgagtagctgagactacaggttgcgccagcacacctggctagattttttttattttttttgcagagacggggtttcactatgttgcccagtctggtctcaaactcctggcctcaaacaatcttcctgtcttggcctcccaaagcactgggattataataggcatcagcccaggaatttgaggttacagtgagctatgattggcgcccctgcactccagcctgggcaacagagcaagaccctgtctctaaatatatatatatatatatatatatatatgttgctattacagtatacccaaatgttaacatcctttgccaatgtttaaaacaaaggaagaaatatgttagttgtgaactttaaaatgtgtgtgtatgtgtgtgtgtgttgaagagaaacaaaattatccaaaattattttgggaaggaacatactaagacaatattaaaaatctttaatgaccactaaaggagggctgggcttcccagcagtaaggctgggcagcaggggctgggaccaatcccagcactggtcagtctgtaggcaacccatgtccccctcagaacctcagtttcttccaggaccatggatgggagacagagaccagtgcaatgcctgcattaaccctttagttgttagagggtagggaagttgctggctgggtacagtggcttacgcctgtaatcctagcactttgggaggccaaggtgggtggatcacctgaggttaggagttcaagaccagcctggccaacatggtaaaaccctatctctactagaaacacaaaaattagctggatgtggtggcatgcgcctgtagtcccagctactcgggaggctgaggcaaaagaatcgcttgaacttgggaggcggaggttgcagtgagctgagatcatgccactgtgctccagcctgggcaacagagggagactctatctcaaaaaaaataataatgacagccaggtgtggtggcacgtgcctgaacccgggaggcggaggttgcagtgagccgagattgtgccactgcactctagcctgggttacagagtgagattccgtctcaaaaaataataataataataaatagaaggtaaggaatttacagggtgtggtgcttggaggcttcagttcagattatttatgaattatcatgaaggtatggtcttttttttttttttttttttttttttttttttttttgagatagagtctcgctttgtcatccaggctggagtgcactggtgcaatctctgctcactgcaacctccgcctgtcgggtcaagtgattcttttgcctcagcttcccaagtacttgggattacaggtatgtgccaccatgcctggctaattttgtatttttagtggcaatggggtttcatcatgttgtccaggctggtctcaaactcctgacctcaggtgatctgcccgcctcagcctcccaaagtgttgagattacaggcgtgagccaccatgcctggccaaggtatggtctattttaataatcagcccaatactaagcatcaactgtaggtatgccagcaaaaatgtttgaaggccacggcgcagtggctcatggggaggctgaggcaggcagatcacctgagcccaggagttcaagaccagcctgggcaacatggcaaaaccccttctctacaaaagattgcaaaattagctgggtgtggtggtgcacactgtggtcccagctacttggggtgctgagatgggaggatcagttgaaccccggaggttgaggctgcagtgagctgtgactgcaccattgcacagcagcctgggcaagtgagcaagaccctgtctcaaaaacaaaacaaacaaaaagaaaaaaccaaaaatgtttgaagaccacttccccagaacagaggaggggatggatttgagagttcatggtggcttctaggacccagctcctggagcccaagagtgccagcccactgaccaggctctctgctcctctttgcccacaggttacgaagtgacagtgctggtgcgggactcctccaggctgccatcagaggggccccggccggcccacgtggtagtgggagatgttctgcaggcagccgatgtggacaagaccgtggctgggcaggacrctgtcatcgtgytgctgggcacccgcaatgacctcagtactgagccccccctctgcccacggccctcccctacacctcggcccccagcgccacccccgcccccggccccgcccctgccacccctgccgccgccgccgcccaccagtgacagccactctctgtcccctctaaggtcccacgacagtgatgtccgagggcgcccggaacattgtggcagccatgaaggctcatggtgtggacaaggtcgtggcctgcacctcgggtgggtggtgggatcatggaggtggggctgaactggggggtactggggaggcagcccaggggcctctgaaaggtgacgctgaagccattccatgttactgtgcatttactgaacaccagctgtgtgcctgaaccttactgggtgatgctggggacacagtggtgacctgtacagccctgggccctgctcacacaaggctcacagagagaggtggtaaacagatccatgatcaaactgacatccagatcatcggagctgggatcggggaggcaggcagaggggatagggccacaatgggagaaactacaggactatgggagcccagaggaggcgtccgacttaggctgagagaggtcagggtaggcctcccagaggaagtgatagagctgtggatagacactaggtctctgccctcacagagctcccgattatggggacacagacattaagcaaatagttgccctgtataatcatttatttatttatttatttatttatagttattttgaggtttgtttgagatagagtcttgctctgatgcccaggctggagtgcagtggcgtgatcttggctccctgcaacctccgcctcccggaggtggttctcctgcctcaagtgattctcctgcctctgcctcccaggtagctgggactacaggtgtgcaccaccatgcccagctaatttttgtatttttagtagagacagggtttcgccatgttggccaggctagtctcgaactcctgacctcaagtgtgtttcatgacayaaattgcctccctggaaagggaagtggcatgagggagggctgcctgatgattgtaattacactccaggcagaggacaaagcaagcaaagaggcctggaggccagacctagttggagggtaggaagcaaaatcatttatggcttttttcctcaagctytgaaatggaaaagtaatacacgagtaaacttgcgatttcagaatggttcactttttttttttttttttgagactttctgtcacccaggctggagtgcagtggtgcaaccatggctcactgcagcctcagtctgggttcaagtgatcctccccactgcagcctcccaagcggctgggactacaggcatgcaccaccacacctggctaattttttgatatttttgtagagacaaggtcttacttttgktcgcagattggaatggtctgctgttaattttagttttgtttttttctcccatgtctttttttctttgagatgaagtctgactccattgcccaggctggagtgcagtggcgtggtatcagctcactgcaaccgccactccacctcccgggttcatggtgcctgggaccaagatcgtggcccacagtgattctcctgccccagcctcctgagtagctgggattaccggcgcctgccaccatgccctgctaatttttgtatttttggtagagacaaggttttgccatgttggccaggctgatgttgaactcctggcctcaagcagtcctcccacctcagccttccaaagtgctgagattacaggtataagccaccacgtccagactctcccatgtcttaaaaaccaatttaactggttaagttttgcttccatgaaaaagacaaacctgtaaaattgatttaatttgctttcttttttctcatttttttttgtttagattgttttctaaatattraagtcttaggtgtgccaggattttttttttcattaaaaaaaaaacaaacatagagacaaggtctcgctctgtcacccaggctggagtgcagtggcctgatcatagctcattgtacccttgaacccctgggctcaaggaatcccctcactttagcccctcaaatagctggggcaacaggtatgagccattgagtccagcttaactttttatctggaaatgatcttaaacttacagaaaaattgaaaggacaccagtacacctaccgtcctctgttcacagacacacaatgttttttttctgacccatttgaagttagcttacatacatcatggctgcttacttcaatgtgtaggtcctcaatatactttttaactttttattataaaaatttttaaacagaaaagttaatagtcgtgtgaacaaccatattccttttctttttttatttttaagtttgtagctatctatctatttatttatttattttgagaccgggttataaggctggctaatttttgtatttttggtagagatagagtttcgccatgttgcccaggctggtcccgaactcccggactcaagcgatccaccagcctcagcctcccaaagtgctgggattacacctgagccactgcacctggccaacagccatattcctgattttaaaattgtgattgtgttttgtaattggtttatctatgcacatacacatacacaaatagattttgtttttgttctcctaaactatttgggttttttgtttgtttgtttttatttgagacagagtctcattctgtcacccaggccggaatacagtggcgtgatcttggctcactgcaacatccacctcctgggttcaagggattctcctgcctcagcctcctgagtagctgggattacaggtgcctgccaccacatctggttaattttgtgtgtgtgtatttttagtatagatggggtttcaccatattgggcaggctggtctgacctcaagtgatctggcctcccaaagtgctggattacaggcatgagccactgcgcccagacttcctaaactatttgaaatggagttgcacacccacagacaccttcggcaagtcccaagaaaaaggacttttctcttccagcaccacagtgctattgtcacactttaattatcttccagcctctaattattagagtttaatcttccctccatattcaaatgtcaaggtaaaagattagaaagatttttgtcatctaaggagcttggagtttatccattagggcttggggaggattgttttttatggaggcatctgagaggattagaaagaaacccagagtaaggccaggcacagtggctcacgcctgtaatcctagcactttgagaggccaaggtgggcggattgcttgmgtccaggagtgcaggaccagtctgggcaacacagcaaaactccatctctacaaaaaaaaatacaaaaaattagctgggtgtggtggtacacacctgtggtccccamtacttgggaagcttaggtaggaggatcctttgagcctagaaggcagaggttgcagtgasccgtgatggcaccactgcactccagccttggctgcagagcaagaccctgtctcaaaacacaacaaaacagccgggtgctgtggctcacgcctgtaatcccagcactttgggaggccaaggtgggtggatcacgaggtcaggagattgagaccatcctggctaacacagtgaaacaccgtctctactaaaaatacaaaaaattagccaggcgtggcggcgggtgcctatagtcccagctactcgggaggctgaggcaggagaatggcgtaaacccgggaggaggagcttgcagtgagctgagatcgtgccactgmactccagcctgggtgacagagcgagactgcctcaaaaaaaaaaagaaaaaagaaaaaagaaactaggggtaagttagagactggatttgagattgtgaactggagactggaggctgcagacaaaaacccacttcacactctgcaccgcagttttctcatctgtaaagaggaaatcctagaccaggcgcagtggctcacgctgtaatcccagcactttaggaggctaaggcaggtggatcgcttgaggtcaggagttcgagaccagcctggccaacayggtgaaaccccgtctctaccaaaaatacaaaaactagccaggtgtggtggcacacgcctgtaatcccagctactcaggaggcttaggcaggagaatcacttgaaacttgtaggtggaggttgcagtgagaatgatgtcatcatagctcgctaccgcctccaactcctaggctcaagggatcctcctgagtagctgagaccacaggcatgtgccaccatgcccatctaatttttaaaatttttttgttgcgacagagtctggctttgttgcccaggctggtctctgtgacacacctttttataaccactaacattactcaaactatttatttatttctttttgttgagacaaggtcttgctctgttgtccaggctggagtgcagcggtgcaatcacagctcactgcagcctcgaactcctgagctcaagcgatcctctcgcctcagccttctaagcagctaagaccacaggtccccacgcctggctaattttttaattttctgtagagacaggtctcaccatcgtacccaggtgagtctagaactgctgggctcaactgatcctcctacctcagcctcccaaagtgctgggattacaggtgtgagccactctgcccagcctttgaacaatttatatcatcccagtttgcacatgaggaaacaagaagctggccagtggtcgatccagtacttgactttaggcaaaacccaagctctttaactattcaccaaactgctcctaaaaatatttagcatagttcttggcttgaggtaaaagttctataaatgtcagctggtgtagcttggccaagttatagcttgttgaaagctaattcctgaacaaatatttagtaagtacctacaatgttccagatgcttctaagggctgggattggagcaggaaatgtgatagagtcacaggataactctagcgtgtggtggcaggggaagggtcctagggagaaaacaaggccccaagaaaagggattggtaaactgggctgggggagacaggattttgcaattttaaacaggacagtcaagaaaagctgcatggaaaggtgacctttgagcaaagtctgcaaagaaaacagggagccatgtggctacgagagggaaatggcaaagggtcctgggtcacacctgtaatcgcagcattttaggaggtcgagatggaaggatcgcttaagcccgggagttcaaaactagcctgggcaacttggtaagacctccatcgctacaaaaaaaatgtttttttctttttcttttgagacggagtcttgctctgtcacccaggctggagtgcaatggcacgatctcggctcactgcaacctctgcctcccaggttcaagggattctcctgcctcagcttcctgagaatagctgggattacaggcatgcaccacgacacctggctaatttttgtgttttttttgttttgttttgttttgttctgctttgtttttgagatggagtcttgctctgtctcccaagctggagtgccgtggcgcgatctcagctcactgcaacctccgcctcaagggttccagcaattctccagcttcagcctcctgagtagctaggactacgggcatgcaccaccatgcccagctaacttttgtatttttactagagatggggtttcaccatgttggccaggctggtctcgaactcctaacctcaggcgatctggcctcctcagtctcccaaagtgctgggattacaggggttagccaccagacccggcctaaaaaaattttttaaattagccaggcttggccggtatcatgccattgcactgcagcctgggtggcaagagggaaggaaactctgtctcaaaaaaaaaaaaaaatagtggggtttggtggctcacccctgtggtcccagctcctcaggaggctaaggcaggaggatcacttcagcccagaaagtcaaggctgcagtgagccgtgttcacgccactgtcctccagcctggacaacagaatgagaccctgtctcagagaaaataaaaaagagagggaaatgcatcaggggcagaggaatcagacattgccaaggctgggaggcagaacctggctggagcagaggcgtgtaagagagagtggtaggcagagtaggcaaggacgtcagagggctgatggggccatatcaggtggggccttgagggctggccatggggactttgcttctaccctgagtgagatggagctatggatgtgaactgataggggtgttcacgggctccttgggaggagggaaggaggggctgagagaccagggagtaggctgctgggctggtccaggcaagaggtaacagtggacaggaccaggcggagtgagaagaggtcagatttggaattattgtgatcagcagacagctcttacctggggtgtgagggaaagaggagccccagaggactcccctgtttttgcaactggaaagcaatggtcagccatggcagggttttgtcctggcatcaagacaagcgagcccttggctgkgcacaatggctcatgcctgtaattccagcactttgggaggtggaggagggtggatcacctgaggtcaggagtttgagaccagcctggccaacatggcaaaaccctgtctgtactaaaaatacaaaaattagtcaggcctggtggtgtgcacctgtaatcccagctactggggaggctgaggcaggagaattgcttgaacccgggaggcagaggttgcagtgagccgagattgcgccactgcactcagcctgggtgacaaagcgacactctgtctcaaaaaaaaaaaaaaaaagacaagagagcccaggctgatcctgccctgtgttccctccagctttcctgctctgggaccctaccaaggtgcccccacractgcaggctgtgactgatgaccacatccggatgcacamggtgctgcgggaatcaggcctgaagtacgtggctgtgatgccgccacacataggtaagcagggcagggacctggtggcaccaatgccatctgcctgttccctcctgccctctggggagatctgcaaggccttccctgaccaccctaaaattgcaaaccttcctatgatattgtgacatatatatttggcctttgtccctgtttcctggcatacaactcctaaaatccttggaatctccaaaatrgtaaatgtctttttctatgctaatgagttcactgagagctggcagcccctaggcagcttcaggtctggtcaccagaaagactaaggctggattacagggttgggactttcacctctggggagtggtgagggattgaaggttgaggggattaccactggctaatggtttaatccattatgtctatggattctggggcttcagmctcctgagtagctgggattacaggcctgcatcaccatgccccgccatggcttacatttctagtatgggagatagagattagatagatagatagatagatagatagatagatagatagatagatagatacataggccaggcatggtggttcacacctgtaatctcatcactttgggaagccaagacgggaggatttcttcagcccaggagtttgagaccagcctgggcaacatagacttatctctacaaaaaaaaaaaaaaattagctgggcgtcgtggcacacacctgtggtcccagctactgggaggcgggaggatggcttgagcccaggagatcaaggctgcaataaactgttgcccaggctgctgtactccagcctgggtaatagagtgagaccctgtctaaaaaaaaaaagaaaaagacaagaaaagatagatattaatggccgggtgcggtggctcacgcctgtaatcccagcactttgagaggccgaggcgggcagatcacaaggtcaggagatcgagaccatcctggctaacatggtgaaaccccattctcctgcccagcctcccgagtagctgggactacaggcgcccgccaccacacctggctaattttttgtattttttaatacagacggggtttcacagtgttagccaggatggtctcaatctcctgaccttgtgatccgcccgcctcggcctcccaaagtgctgggattacaggcgtgagccactgcgcctggctttttttttttttttttttttttgagacagagtcttgctctgccgccaggctggagtacagtggtgcgatcttggctcactgcaaccttttgcctcctgggttcaagtgattctcctgcctcagccccccgaatagctgggactacaggcgcgtgccaccacgcccagctaatttttgtatttttagtagagacggggtttcaccatattggccaagatggtctcgatctcttgacctcgtgatctgcccaccttggcctcccaaagtgctgggattacaggcgtgagccaccacgcccagccaagtgtgtgaaaacttccacacctcccgatttgaaagcattaaaggtttatgaatacacataagccctttgtttaggttcaatgcttagcattttatcctgttgtctctccctctctcctcctctctctctctccatgaatatatagttagattttgctgaatatattgtgaaaacatatatgcatatgtatatttggcttaatcatttgagaggaattrcaacattgtcgcacttmactcctaaatacctagacagccatctcctaaaagaaagatatttgcayacaaaacatgctcacacctaaggaaagtgacatttactctgtcatatcatttagtatccactccgtagtaaaatttccccaactgtcaggccagcgtggtggctcacatctgtaatcccagcactttgggaggctgaggcgggtggatctcttgaggtcaggagttcaaaaccagcctggccaacgtggtgagaccccgtctctactaaaaatacaaaaattagccaggtgtggtggcggacacctgtaatcccagatactcgggaggctgaggcacaagaattgcttgaacctgggaggtggaggttgcagtgagccaagattgcaccactgtactccagcctgggtgacagagcaagactctatccaaaaaagaaaaaaaaaaattcaacccactctgccctttttctttaagtttctcataacattaaccaggccaggtgactttaaaggcccacattctggatttttctagctgttttgtcacagattcagattaaacatgttgggcaggaatgccacatgggtgaaggtgtgtgttccttttttttttttgagacagggtctccctctgtagcccaggctggagcgcaatggcacaatcttggctcactgcaacctccgccttctgggctcaagtgattctcctgcccaagtagctgggactacaggcataagccaccacactcagcgaatttttgcattttttgtagagatgtggttttgccatgttggctggtctcaaactcctgagctcaagtgatcctcccaccttggcctcccgaagtgctgagattacaggcgtgagccactgtgcccagccagggcaggagcttcctgtctgctttgtcccaagcaaacacacagccaagggtgtgtgttccatactgtgcataattccagcctgtctctgtttgggtgatggtacattgtatccctaagtttagttggttactgtcagatagacagatatatatctatctgacaaatatatatatatatatatatatatatatatatatwtrttrttgttattgttgttgttgttgttagagacaaggtcttgctctgtcgtcccggctggagtgcagtgtcacgatcatggctcactgtagcttcaacttccctggctcaagcaattctccagcctcagcctcctgagtagttgggactacaggggcatgccactgcacccggctgatttttgtatttttagtggactcagggtctccctgtgttgcccaggatagtttcaaactcctgggcttgagtgatactcctgtctcagcctcccaaagtgccaggattacaggcatgagccaccgccactggccagggcaggggattcctgtctgctttgtcccttgcttgggtgcccagcacctggccacacaataggtaatcaataaggatttatcgaatgaatgaagcaaaggatatagatgagcacctgcatatggaaagtccattcttggctgtgacaccacmcaggctggacacacagtaggcaccctgggaaggtctttctgggggtcgaattttgggggaagggaaaggtgtctgctttatccagcccctcttgtctttacttcataggagaccagccactaactggggcgtacacagtgaccctggatggacgagggccctcaagggtcatctccaaacatgacctgggccatttcatgctgcgctgcctcaccaccgatgagtacgacggacacagcacctacccctcccaccagtaccagtagcactctgtccccatctgggagggtrgcattytgggacatgaggagcaaaggaagggggcaataaatgttgagccaagagcttcaaattactctagagaaaccgactgtgtgactcttcctctctctgcctctgtctgagtattttggtgtgtctgcctgcctctgtgtaagatttgcttgttatgcattcattcatttgttcagtaacagtttatttttatttttttatttttttgagaccgagtcttgctctgtcgcccaggctggagtgcagtggcgcaatctggctcactgcaagctccacctcccaggttcacaccattctcctgcctcagcctccccagtagctgggactacaggcgcccactaccacacccagctaatttttttgtatttttagtagagacagggtttcaccgtgttagccaggatggtcttgatctcctgacctcatgatccgcctgcctcgcctcccaaagtgctgggattacaggcgtgagccactgcgccccgcccagtaacagtttattgagtctggccaggcatggtggctcatgcttggaatcccagcacattgggaggccgaggcgggtagatcacttgaggtcaggagttcaagaccagcctggcgaacatggtgaaaccctgtctctactaaaaatacaaaaattacccaggcgtggtgatgcacacttgtaatcccagctacttaggaggctgaggcaggagaatcgcttgaacctgggaggtggaggttgcagtgatccgagattgtgccactgcactccagcctgggtgacagagcgagactccatctcaataataataataataataacttagctgggcatggtggtgtgcacctatagtcccagatactcaggaagctgaggtgggaggatggcttgaagccaggagtccaggttgggcaacatagtgagaccccatctctacaaaataatttttaaaaacttagctgggcatggtggtgtgtacctgtagtcccagatactcaggaggctgaggcgggagaatggcttgaggccaggaggtcaaggcctggccactgcactccagcctgtaggacagatccagaccctgtctctgaaaataaaaaaaagtttgtgctttattttgaggatttatgcaaggagtggagcaccagagaagtaaggcaggggggacagttgggtgttttatgaagcttcctttggctactctgtgaaggtggaaaggaagggtccaggaatggaggctgatagcccagagggagttggaggaggaactgtaaggaggggaggagagagtgggtgtgaggaatgcctgggagcctgcgtggacagttggtgaggggtggaggggaggcatcagaaagaagcatacggctgtaacccggggacagagttacactagtgcttcaggagggaggctgaggctgcagtgagccaaggtgcgccactgcactccagcatccacgacggagtgggaccccgtctcaaaaacaaaaacccaaatgcagtagggctttcctgagttgtggaccctataggaggcgcaggttttggaggaggaaggggaagaattgctccttcctaattatgtccttttttggaacctactgtccctttctttttttcccagggacaccttccctaggcctgggtgagctaagacacttctctctccctacctccaacccacaccacccacctacctattcccctcccatttatcctgcaaacatcaggatgacttggttgacaaactccaaccggcaagaactggtctgaggaggcttaaacctcccttcccagaggtggcctggagaaaactgcctcctccccttagggaaactcgttgtaggggcggagcattacgggtgtgggctttcaggacactagcagtgtcttctttctgccttatttttctgtcacattcctgagcatttagcaaactttcactgggacctgctacgtgtccagccctgtgctaggtgatcctgcagaccaagaggtggttgacagagatatccttggtacctgccctcggcggggcgttcctcagtccatatagtaactgacagtccaggactgggatggcggcacaggaggccatggaatcctagaatggatcctaacccaacctggactgccagggagggcttcggagaggaggaaacctttgaaatgtgttctgagaagcagcctgggaattgagggtatattttgaggatgaggaaacaagtttaaatatccagaggcgagaagattgcttgaggccaggagttcaaaaccaacctgggcaacacaagaaaacccccctcccccctcccccatctctctgtcacccaggctggagtgcagtggcacgatctcgccttcactgcaacctcaacctcccaggttcaagcgattctcctgcctcagcctcccaagtggctgagattacaagcgtgcgccaccacgcccagctaatttttgtatttttagtagagacggggtttcaccattgttggccaggctggtctcaaactcctgacctcaagtgatctgcccgcctccgcctcccaaagtgctgggattacaggcgtgcgccactgcgcccggcaaaaaataatattaataataaagatccagaggccttttattgtcatgtttgcgaacttattatgtacctggcattgttgtagacactggggtaaagcagggaagaaaacaaacagagaaaatcctttcgttttcctgatggggtgaatgggagcttgaagccattttagaaaaactggaagtgactcaatggggcaggatcggagagaaccaggagaacgcatcaagcaaggtcgtgaggggctttgtggcaaaaggaaggagtttgaagtttgtattcggggtgggtaggaagccatgaacagtagcagaggagtcatcttgatggagcggggaaggaaagagggtgtcagaagacccaggtgggaccaccagaggacgtgctgagaaaacctgaggattaagaaggggccgcgcggtaacgtatagggggcgggaggggcagcaagggggcgaggctacgatcgcctaggcaacgcgggccgcgccactctattggctggtcttccgctacgtcatcccccgcgccccagcgtcctccctcggaaccccgggggcgcggcctcctccggttgctcggccccgcccgcctgcacagcgacttggggaggggcatgccagcccctctggctccacggtggagtccaggcctaccataaaggaaccgcagggagcaatggtgacgatcttggagcgaggactgtagctgagtggaaggaagcggttctgttggaccggccgccctccaccccggagkcgctgccccgccccctgccagttgcacttctttaaatggcccggggcgctagggaggggtgggcggatccggcgtctcggggcacgggcggatggctccgcccagccaatcgacgccccgcggygggcgggactccagccaatcgcggctcgcggctcggctccggggcggggctggtgggccagaggccagacggagaggccccgccgaggtgagcgaggctccaaccggtcactggtgggtcctggcactggcgggtcgcaacgctgtgggcgttccaggaggtggtcgtggcgaacctggcagctgcggtgaggagtggtcgcctggcttgggaatttaccttaggctgggggagagagaagcgcgccccggggacttgcggaggcggggtctgggtgggaccgggggagggggcctcagattcagggtgatgatagggagggtctggggacctgagactgagttcaagacccaggaggggaggcgaggttgttggggcagtattttcaagtggagggagtttgaagctgggacgttgggcttttggagaagcgagagaacagaggggaggaacttttgagacagggaacctggagattcgattccacttgggtcttccggacgggttgaattcggggctttatcgtgttctggaaaaggtgtgagaggtacggagctgagattctgagtatttggagaagcgagagaactagggtcaaggattcttgggactccaagacgcactggcgggggaaggrggttgccgggaagagttcaatgttcgggtcttggagccggacagcgagtttggaggtgaagtccaggggcgtttgaaagtcaggagactaggagaagtgggaggaagtatcagaattaggatacgtagtctcccgaactagatcggagcattgtcgtctttgagcgatgtgttcggatctgggtctctggatccaagggcagtttggaaggagaatcgcggactttcaaggaacagagggaccgggagaaagcaaatttagagccggagtctggggtgggggaggggtgttccgggcctggagctcagactcgcggccccggaggcaatggagggcggggctcggcaggcgccggcagctggacgtccaggttcccttcccccacccgcctgtgcccctgtgcgcatgccctgagggagagcggggtgaggggggtggctcgtcccctggacgggcggagccctctggggattgtagtgcgtgctcgacgtcaattcgtgtacctggcggctgttggcccccgtttcccagaagcccctgggccaaattggggcgttcctggatgctctgtaaggacccatgggggggcggggccttacagtgtcgcggtctgattgagtgggacctccgagggggcggggcttggtctgagctgagttctagcaagttttcctatggggcgcgctttgggggaatctgaaagcgtgggcagagggaatgagacaggcccctttcctactcttgggagcgctcccagtcggttaaggaagaggacatagaaatatcccgactgttgaagaagaatctcaacataggttccccaacagggctccaggagatttcgaatatagtaggcactcagtaaatctgttgagcgaataactggcaattaactcttgatcgaggccgggtgtggtggtaatcccagctactcaggaagctgaggcgggaggatcgcttgagcccaggacttcgagactgcagtgagctgtgatagcgctgctgcactcagccctgggcgacagagcgagaccctgtctctaacaaaaaacaaacacaactcttgttcattaagcacttccggtgtggtgggccctatagatacgtggcatctccttgacagaggtggtgagaagtatttttttacagtccctattttacagatgaggaaactgaggccctgagaattgactcattcagatcacttcccatgatcacgcagctgagcagtttccaatacagaattcagatttggggttccctacttccaatccaggtctctgtgctccacacttgtctttcgtgctccatgtttgaagaaattaatattgtggaagaacagttttaaggcttagaggaacttgagttaggatccgtacttggcagatgaggaaattgattctcatggatgtaaattcactgtttgaggccacaacaggcaagtaagtgagatttaaatctagctgtacgtaacgccagatcttattttcttaatcgtatatgtactcaccttcttaaacttgtaggattcagacagccttcattttatacatcagtaaactgagattccgatgattaaaaatcactaacaactcaataggcctgagaaagtgggatatgagccagcactacggtgtctggtgtctgaccttcccctatgcgcctcttctctctacagggcatcatggtgggaggcttgaagaggaaacactctgatttggaagaggaggaggagaggtgggagtggagtccagcaggccttcagagctaccagcaagccctgctccgcatctccctagacaaagtccagcgcagcctgggcccccgagcacccagcctccgcaggcatgtcctcatccataacaccctccaacagctgcaggctgcacttcgcctggctcccgcccctgccctgccccccgagcccctcttcctgggcgaggaggatttctccctgtcagccaccattggctctatccty

SEQ ID NO: 94612 - DNA, 27757 bp, Homo sapiens
  misc_feature (1)...(27757): n = A,T,C or G
taattaggaatctgcctgttcctctaacattctgtgctgagtgtgtgcaggctgacagatgtaagtcccattcattcattcattcattcattcattcattcaactatagtgtcatcttccacatattctataacttatcctgtgttttaaattaatcattcatccccaaattcaactggtttcccatttttcacggttgcaatgttgaaatacacatttttttttcgagtttccttgtccatgtatgaaaatgtctccaaggacatatatctctgcaagtttcaactccagttactttctgaaactctcctccaataccaccatgcaaatgaacagatccaccaaattcgaacggcctgaccaacaggtagtatcatcccatttttttcttccaacgtataagaagtgacaacctacatgcattactgtgattttgatttgtatttccctgattacaggtatgattaataatcaattgtatggtttaatggtccttttatttcccttttctgtcaaataataatatcctttgtctttttaaaaaagatataagtatggccaggcgtggcggctcatgcctgtaattctttgggaggtcaaggcaggtggatcacctgagatcaggagttcaagacctgcctggccaacatggtgaaaccccatctctactaaaagtacaaaacttagctgggcatggtggcacacctttgtaatcccagctgctcaggaggctgaggcaagaggttcacttgaactggagaggcggaagttgcagtgagctgagattgcaccactgcactccagcctgggcaacagagtgagactccatctcaaaataaaataaaataaataataggccaggcgcagtggcgcatgcctgtaatcccagtacttcgggaggccgaggagggcggatcacgaggtcaggagatcgagaccatcctggctaacacggtgaaaccccatctctactaaaaaaatacacaaaattagccgggcatggtggctggcacctgtagtctcaggtactcgggaggctgaggcaggagaatggcgtgaacccaggaggtagagcttgcagcgagctgagatcgtgccactgcactccagcctgggcaactgagcacaagactccgtttcaaaaaaaaaaatttttttcacaatttaaaaagtacaggcccgtcattttgcagactgtccctcatttggggttcatataatgttatctcactaatatattcaggcctagagtttatgtttaaaatatggccacatagaaagggaagagggagaaaagtcaagtgacctctggtgaccaaggtcaacatcattagtgccaggtcatgttgctaataagtccccttgatatggtgtgatgatcatggtattttacctctgtgaccttcctctccaaaacccatgaactcatttgttggatgagaaaacctgcaataaatcccaaaggaggaacattgtacaaaatgcctcaccagtgttcttcaaaaccatcaaggtcatcaaaaatgaggaaagtcggccaggcgcagtggttcgcacctgtaatcccagtactttgggaggccaaagtgggcggatcacctgaggtcaggagttcgagaccagcctggccaatatggtgaaaccccgtttctactaaaaatgcaaaaattagccgggtgtagtggcgcgtgcctgtaatcccagctactcgtgaggctgaggcaggagaatcacttgaactggggaggcagaggctgcagtgagccaagattgtgccactgcactccagcctgggcagcagagcaagactccatctcaaaaaaaaaaaatgaggaaagtctgagcaacaactgtcacagccaagaggagcccaaggagaaaggatgagtgtatgtcatgtactatacaggatgggatttcggggcaaaaaaagggcatgagacagtgagccaagatcatgccactgcacttcagcctgggcaacaaagagagaactctgtcaaaaaaaaaaaaaaaaaaaaaaacacgagcatgagataaaaactaaggaaatccaaattaagtatggactatgggaactctctgtactctctttgcaatttttctgtaagtctaaaagtgccctaaaaaatgaggcgtattaaaaatatttttttcctgtttgggaagagtttagaaactggaaatactagattcaggagaagggcagacttgcttgataagggaccgatgtttgtgcagtaatttggagtgtggtttgtttttgaatctttaattaaatcctgggattggccgggcgcagtagctcacacctgtaatcccagcacttttggaggccgaggcgggtggatcacgaggtcaggagtttgagaccagcctggccaacatggtgaaaccccatgtctactaaaagtacaaaaattagccaggcgtggtggtgggcgcctgtaatcccagctactcaggaggctgaggcaagagaatcgcttggacccagcaggcggaggttgcagtgagcccgagatcatgccattgcactctaacctgggtgacaagagcaagagtccatctcaaaacaataaataaataaataaaattaaaaagtaaaacctgggattatatatcgctgatagatattcacgcttgaaccacagttactataaaatgcaaaaattcttaatactgttattctttgcactttttcttaatcattttatatatatgcatatatatatacatatatatcttgtttaggttgttttgtacagatgtgggccaccactgcaacaaaataaattctttttgctctaaaatatttataaagaaaatacttaaatgtgatgtacagggtggtaataagggaaaaatcaagtattataaacaagaatgaaggctttttttctttccttttttttttttttttttttgagacggagtctcgctctgtcgcccaggctggagtgcagtggcgagatctcggctcactgcaagctccgcctcccgggttcatgccattctcctgcctcagcctcctgagtagctgggactacaggcgcccgccaccaagcccagctaattttttgtatttttagtagagacggggtttcaccgtgttagccaggatggtctcgatctcctgacctcgtgatccgcccgcctcgagcctcccaaagtgctgggattacaggcgtgagccaccatgtccggctgagatggtacattttatatatttttttccttctttttccaggaacaaactggttggctgagattctctgcctgatgcactccaagggggatgccaagtggatccaatctgtgcccatctgggagcgatcaccctgggtagagagtgagattgggtatacagcactcagtgaaacggagagtccacgtttattctcctcccacctccccatccagttattccccaagtctttcttcagttccaaggccaaggtcagtgcataatggttaagacgtgtttgatcagtgcctttcaaacactgatatgcctataagtcatctggagatcttgctgaaatgcattctccttcaacaggtctgtgttgttgagacctgagattccgtattaggtgacacctatgtggctgctcccagaactgtccttgannnnnnnnnnnnnnnnnnnnctactaaaagtacaaaaattagccaggcgtggtggtgggcgcctgtaatcccagctactcaggaggctgaggcaagagaatcgcttggacccagcaggcggaggttgcagtgagcccgagatcatgccattgcactctaacctgggtgacaagagcaagagtccatctcaaaacaataaataaataaataaaattaaaaagtaaaacctgggattatatatcgctgatagatattcacgcttgaaccacagttactataaaatgcaaaaattcttaatactgttattctttgcactttttcttaatcattttatatatatgcatatatatatgcgcatatatatatgcatatatatatacatatatatcttgtttaggttgttttgtacagatgtgggccaccattgcaacaaaataaattctttttgctctaaaatatttataaagaaaatacttaaatgtgatgtacagggtggtaataagggaaaaatcaagtattataaacaagaatgaaggctttttttctttccttttttttttttttttttttttgagacggagtctcgctctgtcgcccaggctggagtgcagtggcgagatctcggctcactgcaagctccgcctcccgggttcatgccattctcctgcctcagcctcctgagtagctgggactacaggcgcccgccaccatgcccagctaattttttgtatttttagtagagacggggtttcaccgtgttagccaggatggtctcgatctcctgacctcgtgatccgcccgcctcggcctcccaaagtgctgggattacaggcgtgagccaccacaccgtgcccagaccaagaatgaaggtttttgtaaagatttctgttcagtgttttgcaaggtaaaattctaggcacgttttccctgaagttatgtgtatgtgagtattctcattcttcccaacttgcctttgaagagtgaaaaaacattattatcaagtagacttctattcagcttttgctcctgccctgctgtttatcccttaagaatgagtttcttggactttcccaatatgtgatttttttttcccatttagaatggtgattttaaatgtgtgagtgcatgcattatcttatctcagatatttgcacccccaatccacccccatctccctaaagctagaacactgccaactgatctgttgtataggtcctttagaaacacataattaggctgggcttggcggatcacaaggtcaggagattgaaaccatcctggctaacacggtgaaaccccgtctctactaaaaatacaaaaaattagctgggcgtggtggcgggcacctgtagtcccagctactctggaggctgaggcaggagaatggcatgaacccagtaggcagagcttgcagcgagccgagatcgcgccactacactccagcctggacgacagagtgagactccatctcaaaaaaaaaaaaaaaaaaaamaaacacataattaacacttaaggttgggtgctgccaattctttgtgaaaatccaaatattattaaggaaacagggagatgccactaactcttgattttccatctaaaaacatacatgtttatgcaaacaaatctttccatattcatagtgacttttcaagtatttgagtctaaagattttcatctcacatttttataccgtttaaattgttcacaattattacatacacgtcagccatcaactaaagttgtactttaaaaatttactacaatatatacactgctaatatttgtacttactctttttttctctagagtggaggtataattgtgtgatacttcagaaatacagataaatgattcaaaaagtctcagggagaataatgtttctttgatcgtgaataactgattagtaattcttgcctatattttcctgagagcatatgacaaatgtttctaaggtaacaagatgagaacagataaagactgtgtggtcttttggatttggagagacatattttaatttttaaatgcagttacaaattataatgtattcatatttgtactttctgttaaaatgcacgattgcaggattatttagattttgtgtttatgcttgatgaaaagctttgttcttgtttttaagtttgcactcaaaccttaagaaataaattcacccatattatcaaaaaaaatatttgtcctcgtgtttgttattcgatcttgcagttcactctcaggaacgcaagctcagatgacccctaaaatggtctctagataagttcatgattgctcaacatcttcaatcttttgagtatgggtcacattatacctctctttatcagcaagtaaactttacaacaaacatgtgacatgctgggacaaggttaaagatcgttttatccttgctgtaaaagctgatctgcctgtagctgccacagcctccagcggtggctacagttgaaaccctcacaccacgcaggaagaggtcatcatcatgtcrgacgatttcttatggtttgaaggcatagctttccctactatgggtttcagatccgaaaccttaagaaaagtacgtgatgagttygtgataagggatgaagatgtaataatattgacttaccccaaatcaggtaaggaggcagaatngtgaactgagaaaggctgtggttgtgttcctgtccattcagtgcatgattggagttcttcctttatgtcagacagtgtacaatgctttaaggggaagagaggaatgcctaataccattgacaatcagagaaaaggatttagtcaggaaattacacagtaggatgagtgttcagaggggtaatctaaggtattaggagaatccacaggagtgaatcccaaggcaaattcaggtgtttgtttggtggcagtgggagggaggatggctgaggatgaccaatgatgtcctgaaagaagaaatagcatttaaatggaaatgcaaagaatgagtatgaaattacttggggggagggctattttcagwtaggagaatcatcagggcaatggccaggaaccacaaaagagccaggcaatctcaaggggctgaaagatgaggatcatatgtctctgggagtggggctgtgggtggagggcggtaagagcactgcggatgcggtgaggattgaggctgaagacattggaagtggcatggccctgagaggccaagagcaatgggaacataataagagggatttcagcaaatagccaaaagatggaagcaacccagatatccactgacaggtgagtgaataaacaaaatgtggtatatagctataatggaatgttattcatccttgagaaggaagaaaattctgatgcatgatacarcagagataaacatcaaggacattmtgctaaatgaaataagccagtcacaaaaatacaaatagtgtgtgattccacttacataaggtacctggagtcatcaagtccatagaaacagaaagtacactggcggctgccaggggctgaagagaagggtaaatggggagtcggtgctggctctgcatagagtttcggttttgcaacacaaaaatcctctggagattggttgagcagcactgggaatatacttaacacttaacactacgaaaccgtaggcttaaaagtggttgacaggctgggcatggtggctcatacctrtaatcccagcactttgggaggtcaaggcaggtggattgcctgaggtcaggagttcgacaccagcctggccaacatggcaaaaccccgtctctactaaaaataaaaaattagccaggcgctgtggcgcacgtctgtagttccagctactcgggaggctgaccaagagaatcacttgaacccaggagatggaggtggcagtgagccaagatcatgccactgcactccagcctggktgacagagcaagactctgtctcaaaaaaaaaaaaaaaaaaaaaaaaaaagtggttgagagctggctgcagtggctcacgcctacagtcccagtgctttgggagggcaagataggcagattgcttgaggtcaagcgttcaagaccagcctgggcaacatagcaaggcctgatctctacaataaaattttttcaaaaaattagcccagcgcgatggcacatgcctgaggtctcagatacttgcgaggctgaagcaggaggccgaagtacaaggatcacttgagcccgagttcaaggctgcagtgggctataattgcaccactgcactctagcctgggctacagagggagacctcatcgctaaaaaaaaaaaaaaaagccaggcgcagtggctcacgcctgtaatcccagcacttggggaggccgaggcaggcagatcatgaggtcaggagatcgagaccatcctggctaacatggtgaaaccccatctctactaaaaatatattwaaaaaaaaattagccagacgtggtggtgggcgcctgtagtcccagctacttgggaggctgaggcaggagaatggcatgaacccgggatgcacagcttgcagtgaactgagatcgtgccattgcactccagcctgggtgacagagcaagactctgtctcaaaataaataaataaataaataaataataataaaaaattaaggttgagatggtacttttttttgtttttgtttttgtttttttttttgagactgagtctcactctgttgcccaggctggagtgccatggcacgatctcggctcaccgcaacctccgcctcccaggttcaagcaattctctgcctcagcctcccaagtagctgggattttaggcgcccgccaccatacctggctaatttttgtatttttagtagagacggggtttcaccatcttggccaggctattctggaacccctgacctcatgatcacttgcctcagcctcccaaagtgctgggattacaggcgtgagccaccatgtccggctgagatggtacattttatatatttttttccttctttttccaggaacaaactggttggctgagattctctgcctgatgcactccaagggggatsccaagtggatccaatctgtgcccatctgggagcgatcaccctgggtagagagtgagattgggtatacagcactcagtgaaacggagagtccacgtttattctcctcccacctccccatccagttattccccaagtctttcttcagttccaaggccaaggtcagtgcataatggttaagacgtgtttgatcartgcctttcaaacactgatatgcctataagtcatctggagatcttgctgaaatgcattctccttcaacaggtctgtgttgttgagacctgagattccgtattaggtgacacctatgtggctgctcccagaactgtccttgagttcaaggatatagaccattccacagattaccccagccagatttaaaccagggatagggtgaaaacactaacccagaatcttagaaaactaggttctaagtgcaatcagaatgtatagccatattatatactagataaccgcctttggttgccctaaaaaataattagccaatctgaattcaacaaatgcctcctgccacagaaaagacacagaggtgttcctatgggaagcagcatgttcatcaatcaatgcctgtatccaggttgactgcccyggggccaggactgggctctgtacacacytcgtcttactgtgtgtaaatatgtgttgatatcagcagccacatgcatctcccatggggcagaggggtgatcacaagagggacaaggcatatccaggaccttgcatggctcagactgcttctagaattgtactttcctggaaggtgtttataggtgtgtgaattattattattattattattttgagacacagtctcattctgtcacccagrctggagtgcattggtgcgatcttggctcactgcaacctccacctccccaggttcaagtgattctcctgctccagcctcctgagtagctaggactagaggtgtgcgccaccatgcctggctaatttttgtatttttagtagacacagggtttcactatgttggccaggctggtctcgaactcctgacctcgagtgattcagcctcccaaagtgctaggattacaggcatgagccaccatgcctggcccaaaggacaaagtaatgtctctgaaatgtgtccatgatcttgggtgttgtatatggataatattgctatatatctatgaatgtagcttaatttatgaattcattctcctgttaatgatctttaaaccatagtacacaaatatacatcactcacctttggaaaccttccatgttcttcccattgtgagcagactgtaatatcccagagggaaggaacgatrcttccttcttccattgatatattcctagtgcagtgactacttcataggcacrtcaaatttgattagtgagtgcagtaagtaatttgttaaaagaatccattgatattattaggcattatccaggaattggctttttctccatttttgtgaagatcaaaaagagtgaggattgactgtattgatttttcattctcccgtttttccatttaaggtgatttatctcatgagaaatcccagagatgttttggtgtctggttattttttctggaaaaacatgaagtttattaagaaaccaaagtcatgggaagaatattttgaatggttttgtcaaggaactggtgagtgtttcacaaaatatgggggtgcttggagtcttctagccgacctcttttgayacccagcctcacatctctacatctcaccaacccatgggttgaaaggctccaccacccctggaggccaaacctgctaagttcgcttactctcccgcatagcagcagaactctagccggcccctcagcttgccccatgataaaccatcctagctattttctaagtctctagagcctccaatactagcacaggaaacttatattctcctctagtctcctaatgctagatktctggaagttagcttttcactggcttccgggacaacacaatcctgaccttccgccatttttttctgatgcctctttccaaaaccctcttaatattctrtttctatctgtctcagaactgattgcatgactctaggatcgctatatatttagttatgcagaattcctgggctttttcagtactttccattttgcaattgatctcaaaactctatgagcctctatctcagctgtgatgtgtctctctgcaatacaccagctacagatacctccattagagagagccaccaatgcctctaattcagtacattcaaatttgaacacctttctggctgggcgcggtggctcacacatgtaatcccaacactatgggaggccgaggcgggtggatcacctgaggtcaggagttcaagaccaacctggtcaacataatgaaaccccgtctctactaaaaatacaaaaaattagccggccatggtggctcacacctgtaatcccaacactttgggaggccaaggcaggtggatcacctggggtcaggagttcgagaccagcctggccaacataatgaaactgtctctactaaaaatacagaaaaattagctggccgtggtggtgggtgcctgtaatcccagctactcaggaggctgaggcacgagaattgcttgaacccgggaggtagaggtggcagtgagccaagatcacgccactgcaccccagcctgggcaacaaaatcaaaactccatctcaaataaaaacatttgaacacctttcttaactgcgtggggtttatcttactccacccctcatgcaaagactagcatgagtctaatatttcataagcattctcttttcccatcccactcccctaggcccctcaccactttcctatctctaattattaattaagtcctaccatcttgattaatatcttcattctggtctcagcactttgggaggccgaggcaggcggatcacctgaggtcaggagttcaagaccagcctggccaacatggcaaagccctatctctactaaaaatacaaaaaattagccgagtgtggtggcatgtgcccgtagtctcagctacttggaaggctaaggcaggagaatcgcttgaatctaggaggcagaggttgcagcgagccgagatcgctccatggcactacagcctgggtgacagagtgagactctgtgtcaataataataataataataataataatgtattccatacttgacaattgctaagagagaccatcttaaatgttctcaccgccccgacaaaaaatggtaagtatatgaggaaatgaatatgttaattagcttgattctgtctgatatggttaggctttgtgtccccacccaaatctcatctcgaattgtaatccccataatccccacgtgttgtaggagggacctggtgggaagtgattggatcatagtagtggtttcccccatgctgttctcatgacagtgagtgagttttcacgagatctgatggttttatttatttattacagcttcaggttttttttttttttttttttttttgagacagagtcttgctctgtcacctagtctggagtgcagtggcgcgatctcagctcactgcaagctccgcctcccaggttcacaccattctcccgcctcagcctcccgagtagctgggactacaggcgcccgccatcacacccggctaatttttttgtgtttttagtagagacagggtttcactgtgttagccaggatggtctcratctcctgacctcgtgatccgcccgcctcggcctcccaaagtgctgggattacaggtgtgagccaccgtacctggcctaggtttttttttaattttttttattgttatactttaagttctagggtacatgtgcacaacgtgcaggtttgttacatatgtatacatgtgctatgttggtgtgctgcacccattaactcgtcatttacattaggtatatctcctaatgctatccctccccctccccccgccccatgacaggcccyggtgtgtgatgttccccaccctgtgtccaagtgttctcattgttcarttcccacctatgagtgagaatatgtggtgtttggttttctgtccttgcgatagtttgctcagaatgatggtttcccgcttcatccatgtccctacaaaggatatgaactcatcctttttcatggctgcattgtattccatggtgtatacatgccacatttgagatctgatggtattataagtggctggcatttcccctgctggcactcactcctccctcctgccrccttgtgaggaagttgccttgcttccccttcctccatgattgtgagtttcctgaggctcccccagccacactgaactgtgagtcaattaggccactttcctttgtgaattacccagtcttgggcagttcttcacagcagtgtgaaaactgactaatacactgtcattccatagtgtatgcgtacatcaaaacatctgttatatactgtaaatatataccatttgttggtccccttcraccaagtttcattcaagttttatttgtcaatcatasgttaacaagccggtggggggatgaacataatagactggatgcctgctctcataaaatttgtaacctatcactttttctgccaccccatgcagtgctatatgggtcatggtttgaccacattcatggctggatgcccatgagagaggagaaaaacttcctgttactgagttatgaggagctgaaacaggtaatcccatcatttttagagtcagtgcacaccctctcaccaccatccttactttccttaaattccytccatcccgctgtgtcttcattccaccctctcagttaaagtggagcctggtgaagagtcacaaagagcrggattaactccctggtcttcattgccctgtttctggttgacccttgcccaagcttcacgctccttattttatcttaaaacatctaagccaggcacgttggctggcgcctgtaatccyagcactttgggaggccgaggtgggtggatcacaaggtcaggagttcaaggccagcctggacaagatgataaaaccccatctctactacaaatacaaaaattagccgggtgcagtggcgagcgcctgtaatcccagctactcgggaggctgaggcaggagaatcgcttgaacctgggaggtggagtttgcagtgagccgatatgccaaratcatgccactgcactctagcctgggcgatagagcacgactctgtctcaaaaaaaaaaaaaaaaaaaaatctagagaggttttttggcaccgggtgcagtggctcacacttgtaatcccagcactttggaaggccgaggtgggagaatcacttgaggctgggagtttgagaycagcaagactccagtctacgaaacagcaagactccagtctacaaaggaaaaaaaaaattagccagatgtggggggtgcacacctctaattccagctactcgggaagccgaggccaggggaattacttgagcccatgaattcaaggctgcagtgagctatgatcacaccactgcactccagcctggggcagcagagcaagacgccggctctaaaaataaaaataaggagcatattccatgcattgaggcagagtgtgatgtctcctgctagcactggtgtatgtaaacatttctcygggtgagacctatggtgctgctgataaccaagcgttgagagggcgctggaagagaggatgggactgggtagaagtgatttagttcctgagatggttccgagtgtctgacatctcagcttggctggtatgaacagaaatgaaggcatgtaatcaatttatctcactattctgagatccaagtactggagtgaatagtgacggagaggaaaagctgtccgatgatactcagaaccagcragtattgaaagaacaacttgaggccaagctsagtggctcacgcctgtaatcccagcactggggaggtgaaggcaggtggatggcttgagtccaggagttygagaccagcctggccaacatagcaagaccccatctctactaaaaatacaaaaaattagccgggcatggtggcaggcacctgtagtcccagctacttgggaggctgaggtaggagaatcacttgaacccaggaggaagaggttgcagtgagccgagatcacaccactgcactctaggctgggcaacagaatgagaccctgtctcaaaaaaaaaaaaaaagaaagaaaaagaaggctgggcacggtgtctcacacctgtaatcccagcactttgggaggccaaagtagggggatcacttgaggtcaggagttcgataccagcctgggcaacatggcgaaatcccatctctaccaaaaatataaaaaattagccaggcgtggtgttgtgcacctgtagtcccagctacycaggacccagctactcaggagaatcgcttgaacccaggaggcggaggttgcagtgagccgagatcatgccattgcactccagcctgggcaacagagcaagactccatctcaaaaaaaaaaaagaacttgacctattagtgatatctcacataaaagagaaaataacaccaacattggattttgtaccacctgggaaacgtcacgtcccaacaccttcctctggctcatcctctccaatcctctatggcctatggtctgggcatgaatttcttttttttttttttttttatgaggtggagtcttgctctgtcgcccaggctggagtgcagtggcacgatctcggctcactgcaacctccgcctctcgggttcaagcgattcttctgcctcagcctcctgagtagctgggactacagatgcacgccgccatgcccagctaatttttttttgtatttttagtagagacagggtttcaccatgttgcccaggctggtctcgaactcctgagctcaggcaatcctcccgtaggcctcccaaagtgctaggattacaggcatgagccaccgcgcccggccatcttttttttttttttttttttttttagacagagtcttgctctgtcacccaggctggagtgcagtggcgcaatctcagttcattgcaatctccacctctccggttcaagtgattctcgtgcctcagcctcccaagtagctaggattacaggcatgcactacaacacctggctaatttttgtatctttggtacagatggggtttcaccacgttgaccaagctggaatgaatttcatttctgttaagaagccctttgtaacaagtttggttggctacctcagatacacgatcccataccttcctgggatcttcctttcggatcacacaatgaacttattttagttatttccatagttgtacatcttcttattagataaccaaggtttatgaaatagaggaaaaaattaaagcattatagatctaagagtaaggcctatgattcaaagcaaagtccttctggttacaataatccattttgttggccaggtgcggtggttcacatccataatcccagcactttgggaggctgaggtgggcagatcacctgagctcaggagttggaacccagcttggccaacatggtgatactccctctctactaaaaatacgtaaattagccgggagtggtggcgcacgcctgtaaccccagctactcgggaggttgagacaggagaattgcttgagcctgggaggcggaggttgcagtgagctgagatcatgccactgcactccagcctgggcgacagagtgagatcttgtctctaaataaatacataaataaaattttaaaaawaaaaatctattaatctcccaggatcatgtacctagtcctaattattgagatgaaatataagaagatattgtaaaactctgtgtgttattcaaaagctagttatgggaaacagtactatctgacagtacagccaggatttgaaatcaagccttcartctccatcagattctccctgaacctctccttgctaaccctaattactgtctagaagcctctctaaacgtctcttaggaaacccgaggctctgtgttttactgttaagttgtcctaaactctaccatacgggaaaatccacgatgatccttgcatcttttgtggttttctggttggttttgttttgttttgttttgctttgttttgtttttgagacagggtctcactccaacgcccaggctggagtacagtggtgcaatcacagctcactgcagcctcaacttcctgggttcaggtgatcctcccacctcagcctcccaagtagctggtaccacagctgtgcgccaccatgcctggctaatttttgtattttttgtagagacagggtctcactatatcgcccaggctggtctaaaactcccggactcaagtgatccgcctgcctcagcctcccaaagtgctggaattacagkcaggagccacggcgcccaacccatccttgcatcttttacatacttcatgccctctcttctttaccttttttctttctttctcctaattgcattcaactcaatcccttctcacatctgcatgttgttcctctcttcttcctcctcctcctcattctgcggttccctccttctcatcttacttttttctattgtctttttttttttttttttttgagaaggtctcactctgtcaccaggctggagtgcagtggcgtgatctcagctcactgcaccctccacctcctgggttcaagcaactctcctcccccaacctcccgagtagctgggattaccggcgcccaccaccacaccctgccaatttttgtatttttagtagagatggggtttcaccacgttggccaggctagtstcgaactcctgatctcaagtgatccaaccgcctcagcctcccagagtgctgggattacaggcgtgaaccaccacgcccagccttgtctttctctttcgtatcctctctcttgatttttcttttttaggacacaggaagaaccatagagaagatctgtcaattcctgggaaagacgttagaacccgaagaactgaacttaattctcaagaacagctcctttcagagcatgaaagaaaacaagatgtccaattattccctcctgagtgttgattatgtagtggacaaagcacaacttctgagaaaaggtaaaagaaaatcctctggtttccaaatataccagaatacacggcatgcatgcctatggtcacaactgggcgctaacagttgagatgaaagagtgcttttttttttttttttttttccgagatgaagtcttgctctatcacccaggctggagtgcagtggtgcgatctcagctcactgcaacgtccgcctccaggattcaagtgattcttctgcctcagcctcccgagtagctggaaattacaggcacacgccaccacacccagctaatttttgtatctttagtaaagacatggtttcaccatcttagctaggctggtctcgatctcctgaccttgtgatccgcccacctcggcctcccaaagtgctgggattacaggcatgagccacggcgcccggccaatttatcagctttaattgctcatcgcccagaacacttctcccgtggcctcagcagggagcctcttcttgtggtactgatgtgggctgtaggtgggtggggaaaattggttccgcccgggaaggttatctgacttacgtgaggtcattcagattctctttcctcagaatgtgacatgagcattatccattctacagacagtgagcaggttaactagcaacccttgctagacctacaagctgtgattcacctgagaaatgaggacaaggacggggttggggatggccacagtgcagctgccccactggtgagttagcatagagatctgtcctggatgggccgggtgcggtggctcatgcctgtaatcccagcactttgggaagccgaggcgggcggatcacaaggtcaggagatcaagaccatcctggctaacatggtgaaaccccatctccactaaaaatacaaaaaattagccgggcatggtggcgggtgcctgtggtcccagctactcgggaggctgargcaggagaatggtgtgaacccaggaggcggagcttgcagtgagccaagatcgtsccactgcactccagcctgggcgacagagcaagactccgtctcaaaaaaaaaaaaaaaaaaaaaaaaaagagatctgtcctggatgaagaaatgtgtgaaggaatgcctcacctggaaaagggagagaagagagactttgctatcacacgctgtaaggtgccaagatgaatggaaatgtctattgcatggggtgaaagaatccatttttccagggccaggcgtggtggctcatgcttgtaatcccagcactttgggaggccaaggcgggtggatcacctgaggtcaggagttcaagaccagcctggctaacacggagaaagcccatctctactaaaaatacaaaaaattagccaagtgtggtggtgggcgcctgtaatcccagctactcgggaggctgaggcaggagaatcacttgaacctgggaggaggaggctgcagtgagccgagatcctgccatttgcactccagcctgggcaacaagagtgaaactccggctcaaaacaaaaatccatttttccaaaatcctacagttctaatacatctgggacagtcctccgtggaagaaaagaattaaatccttcaaaagacccagagtcttgggcaatcgtaaaagtaaacgttggccgggtacggtggctcacgcctgtaatcccagcactttgagagaccaaggcaagtgtatcacttgagctcaggagttcgagaccagcctgggcaacatggtgaaactctgtttctactaaaaatacaaaaattagccatgtgtggtggcgcccacctgtagtcccagctacttggggtggggctgagacatgagaatcgcttgaacccaggaggcagaggttgcagtgagcygagattacaacactgtactcctgcctgggagacagagcaagactccatctcaaaaaaaaaaaaaaagataaatgctgagactttgtataacttatctatattagggatacataccatacacatacaccacagaaagaaaatacacagaacctgtcctacatgatatgtgttatgaggcgaaatacagcaaggatggggagtgacctctaaattgggtggtgagagagaacctcgctgagaaacttgaattggaataaagacttgaaagaggcaaataggcaagtcatgggccaatctgagagagcagcgttccaaggagaaggagcgtgggacgccaatagtctgaggagtggggatgcctgccacgtttgaggcagaatcagaagyccccgtgtgagtagagtgacggagagggtagttttaggggatgagctcagagaagccacaggggctggatcacctggagccctgtaagcgcctccagcacttgtacttgagtgaaacctagagtcctcggaaaatctgagcagagaagtggcatgatctgggatcatgagggctgccatgctgagactaacttatgaaagagaacttatgaaagcagaggccaggccgggtgtggtggctcacgcctgtaatcccagcactttgggaggccaaggcgggcggatcacctgaggtcagaagtttgagaccagcctggccaacatggcaaaaccccatctctactaaaaatacaaaaattagccaggcgtggtggtaggcacctgtaatcccagctattcgggaggctgaggcacgagaactgcttgaactcgggaggcagaggttgcagtgagccaagatcgcgctactgcactccagcctgagggatagagcaagactccgtctctacaaaaaaaaaaagaaaaaaaagcagagaccagttacaagtgtactstaataatccaggtgaaaaatgatgttggcttgagtcaacgtggtagaaacagaggtggtgagacgtgacttgattctggacatatcagatgatatactggcgttattgctgaggaattgtacacaggatggatgggagaaaggagaaaataggaaattgtttccagctaggtgaataactatgtgaccaggcaggataaaggcccaccacgaaccatcggccattctgctatgttagctacaatgtccatgtcaggtgcctggtggagacaggtcaaggagatgtgtggtctgacctgagtttctgcttcttgtttccaggtgtatctggggactggaaaaatcacttcacagtgrcccaagctgaagactttgataaattgttccaagagaagatggcagatcttcctcgagagctgttcccatgggaataacgtccaaaacactctggatcttatatggagaatgacattgattctcctgtccttgtacatgtaccygactggggtcattgtgtaagacttattattttatcctgaaaccttaaatatcaaacctctgcatctctgatcccttccttgttaaaagttaccasggttggccaggcrcggtggttcatgcctgtaatcccagcactatgggaggccgagacgggcggatcacgaggtcaggagactgagaccatcctggctaacacggtgaaaccccatctctactaaaaatacaaaaamcaaaaaaaattagccaggcgcattggctcatgtctgtaatcccagcactttgggaggtcgggggggtgggggaggatcacggggtcaggagatcgagaccatcctggccaacatgatgaaaccctatctctactaaaaatacaaaaattagccgggcatggtggtgcacgcctatagtcccagctactcgggrggctgaggtaggagaatcrtttgaactcaggaggcagaggttgcaatgagccaagatcgcgccactgcactccagcstgggtgacagagcgagaccgtctcaaaaagaaagaagtgactagggttcagagaaccagggttcaaagcccagggatgcaaaggttgcagtgagttgagtcatgggatcccagacttttttaaatgtttgcaatgtttcccgtttacagaatgctacaagaataatgtacgtactacctaaaaggatgtctaaatgtttgttaataaaaataagaaatagctacagtgacagattttagagcaaaaattagtaataaaaataagaaataaaattacaggagcaattaaggttccatttcttttcatcacatgtatctccacaatttattattgctctgatcttaaggagtgtaatttgcaatctaattttatcctcttactctgtgttgttaaaccatatacaataaacggtgtttatggaggcttctaaaactttcataaggccaggtgcggtggctcacacctgtaatcccagcactttgggaggccaaggagggcggatcacttgaggtcaggagtttgagaccagcctggccaacatagtgaaactctgtctctactaaaaatacaaaaattagctgggcatgatggcacatgtctgtaatcccagctactcgggaggctgaggcatgagaattgcttgaacctaggagatggaggttgcagtgagctgagatcataccattgcactccagcctgggcaacagagggagactccatctcaaaaataaaaaataaaaaaactaaagtcttgttccgcaaaagaaccaaagaacctataaagagaatgaaaagataggccaggtgcggtggctcatgcctgtaatcccagcactttcggaggccgaggcaggtggatcacttgagctcaggagttcaagacaagtctggccaacatggtaaaaccctgtctctactaaaaatagaaaaattagccagatgtgttggcggaggttgcagtgagccgagattgtgccactacattccagcctgggcaacaaagtgagactccatctcaaaacaaaatgagaaaacaagaagacaaaccagagatggagaggaagtacttgtaaatctcatatctggcaatggacttgtttctagaatacataaagaactcctaaaacccagcattaaacaaataatcttttaaaagaaaaaaaagaataaaagatttgaacaaacatttcaccaaagaggacacagggatggcaaatcagcacatgaaacgatgttttgcatcatttgcctctagagaaatataaattaaaaccacaacaagaaggccgggtaaggtggctcacgcctatgatcccagcactttgagaggccaaggtaggtggatcacttgagctcaggagtttgagaccagcctggccaacatggtgaaaccctgtctctactaaaaatacaaaaattagccaggcgtggtggcgggtgcctgtagtcccagctacttgggaggctgaggcaggagaatggcttgaacccgggaggcggagcttgcagtgagttatgatcctatcactgcactccagcctgagcaacagagcaagactgtctccaaaaaaaaaaaaaaaaaagtatattttctagctgtttggctttagcttaaattacacaagtggaaagaaatataatgttgcctctgtgtcttttccatgtttttctcccactcgaatgtggggtgtctctcccccatcccacctggaggtcttttgtatggaaggaaccagccggtctaggtggctcctgggacaccccaggtccaagctctggttggccgctccctgggctggaacagtgacgtattgttgccccctggtggccacggagcaccataacrggtatgtggaagccgaggactctcccagttctgggggtgcccctgaatgaaccccatctctgatctgaccccactgtgtctctagagatacaactgcatctcgaagtagcaacaataaaaacccacaatatccttaagttatttcctgtcaggcattttctttaaaagaatttcagggaagcagtctgaggttttttgttgtttttgggggatattcttgagatggagtcttgctctgtcgtacaagctggagtgcagtggcacgatctcagctcattgcaacctctgcctcccggattcaagcgatcctcctgcctcagcctcctgagtaactgggactacaggcgccagccaccatgccaggctaatttttgtatttttagtagagacgggttttcaccatgttggccaggctggtctcaaacccctgaccttaagtgatccgccctcctcggcctccgaaagtgttgtgaatacaggcgtgagccactgcacccggcagaaacagtctgttaaaatgggagtctggaaaaaaattttttttgagacggggtcttgctgtgtcatccagtctggagtgcagtgctaccaccacagctcactgcagcttccacctcccaggctcaagtgatcctccctcctgcctcagccttccaagtagctgagaccacaggtagtgccaccacacctggccaaatttttaattttttgtagagacggggtcttactatgttgcccaggccagtctcgaacttctgggttcagtccatccttccacctcggcttcccgagattagaaagcgtgagccacctccttacctggccttgaaaaccctttttttttttttaagacagaatttctgtcacccaggctggagtgaagtggcacaatctcggctcactgcaacctccacctcccgggttcacgccattctcctccctcagcctcccaagtagctgggactacaggcgcccgccaccatgcctggctaattttttgcatttttagtagagatggggtttcaccgtgttagccaggatggtcttgatctcccgacctcgtaatccacccacctaggcctcccaaagtgctgggattgcaggcgtgaaccaccatgcccagctgaaaaccctttttaactaatgaatttactggtggctactatatttatttggtataaaaataatgaccattcacaggctgggcacagtggctcatgcctgtaatcccagcactttgggagccgaggcaggcagataacctgaggtcgggagttggagaccagcctgaccaacatggagaaaccccgtctctactgaaaatacaaaaattagctgggcatggtggctcatgcctgtaatctcagctactcgagaggctgaggcaggagaatcacttgaaccgggaggcggaggttgcggtgagccaagatcaagccactgcactccagcctgggcaacaacagcaaaactccatctcaaaaataaataaataaataataaataaaataatgaccattcacatctttctctttatggcatttgattttatctaggtggatttctgtgaaagggacaatcagataaggcaattttgagttttcttttactaaaatagttttgtttgtttgtttgtttgtttgtttttgagacagtctcgctctgtcacccaggctggagcgcagtggcgcaatcttggctcactgcagcctccacctccccagttcaagcgattctcatgcctcagcctcctgagtagctgggattacaggcacccgccatcatgctctgctaatttttttatttttagtagagaggggagtttcatcatgttggccaggctggtctcaaactcctgaacttaggtgatccacccacctcggcctcccaaagtgctgggatgacaggcatgagccaccacagctggctttggtgtcttcttaataatgacagttaggcatcaactcccaggagtctgtctactccatggcagggatttgactgagaacagcagtactcaagctttgcacactggaattgcctcagagctttaaaacatactggtgccccaccccaccaacctcactatttttttttttttttaagagatggggcaggccaggtgctgtggctcaaacctgtaatcccaatgctttaggaagctagatgggaggatagcttgagcccaggagttcgagaccaacccaggcaacatagcaagaccccatctctacaggaaaaaaattaaaaattagcctggcttggtggcacatggctgtaggcacagccactagggaggctgggatgagaagactgcttgagcctaagagttcagggttgcagtgagctatgatcacaccactgtacaccagcctgggtgacagagtgagaccccatctcaaaaaaagaaaaaaagaaaaaaatcaggccaggtgcggtggctcacgcctgtaatcccagtactttgggaggccgaggcgggcaaatcacctgaggtcaggtgaggtcaggagttcgagaccagtctggccaacatggtgaaaccctgctctactaaaattacaaaaaaaaatgagctgggcgtggtggcaggcgcctgtaatccaagctactcgggaggctgaggcaggagaatcacttcaacccaggaggtggaggctgcagtgagcctagaccgtgccattgcactccagcctgggcaaaaagagcaaaactccatctcgaaaaaaaaaaaaagaaaatcagaaactagatccagagacctaggatgaagcagggtgttaaagcaagaggttctggcctggcacagtggctcacacactttgtaatcccagcactttgagaggctgaggcaggaggatcacatgaggtcaggagttcaaaaccagcctggaaaacatggtgaaaccctgtctctacaaaatatacaaaaatgccaggcttggtggcttatgcctgtaatcccagcactttgggaggctgaggcgagtggatcacaaggtcaggagatcgtgaccatcctggctaacacggtgaaaccccgtctctactaaaaatacaaaaaattagccgggtgtggtggcgggcgcctgtagtcccagctactagggaggctgagacaggagaatggcgtgaacccgggaggtggaggttgcagtgagccgagattacgccacttcactccagcctgggtgacagagcgagactccatctcaaaaaataaaaataaaaataaaaaaattagctgggtttggtggtggcagtcgcctgtagtcccagctactcaggaggctgaggcaggggaatcgcttgaatccgggaggcagaggttgcagtgagccaagatcgagccactgcactccagcctgggagacagagtgagactccctctacaaaaaaaaaaaaaaaaattggcccttttccccctctctctgatccttacaagacaatgacatttctacctgcactgcctccatctccatcccggagcatgcagggcagtattagcttgaacttgacccatttgtctaaggtacaatgaactgttctcatacgtaccctgaatcctttcttgttatgctttttggctacaggcaggaaaacaagagaaattcttgctcttgccaagacagacatggggaatttcgaaggcccgccttctgaacgtcacctcgtcccctcttccttggtccagtgagaagtccagatgcttcccttggggatgcccagaacacagcctgggatgatgaggagaggcgggagagcttcctaagagatggtaaaattcccttggaattttcggtttccaaagggagtgaagggggctgcttgcttgggtgaaaaaggagggaaattgaatggagaagatatagccgggggcagtggctcctgcctgtggtcccagcactttgggagacatgggctggaggattgcctgagctcaggagttcgagaccagcttcagcaacatggagaaaccctgtctttatcaaaaaaaaaaaaaaaaatagccaggcacagtggcatgcacctgtagtcccagctactcaggaggctgaggtgggagaattgcttgaaactgggaggcggaggttgcagtgaaccgagatcacaccactgcactccagcctgggtgacagagcaaaaccctgtctccaaaaaaaaaaaaaaaaaaaaagaattgaggccaggagcagtggctcatgcctgtaatcccaacactttgggaggctgaggtgggtggatcatctgaggtcagaagttcaagaccagcctggccaacatggtaaaaccccatctctactaaaaatacaaaaattagctgggcgtggtggctagcccctataatcccagctactagggagggtaaggcaggaaaatagcctgaacctgggaggtggaggttgcagtgagccgagattgcatcactgcagtc

SEQ ID NO: 94613 - DNA, 30473 bp, Homo sapiens
  misc_feature (1)...(30473): n = A,T,C or G
ctctgcccccacccctctccaggcccctgcttctgccctgtttgccacagtgagctgccttcctcatgcgcggcccccatgcccttccccgcctctccctcccccttcccttcctgccaggcctaaggctgggccgagcagggcagggtggcacaggccccccacccaggaggtgtgtcccccacaggctgtctctctcagggccgggagcaccaggatggggaggagtttgagggaccagcaggcagctgtgagtggtgtcgctgtcaggtatagcaggaggtggggggtgtggagtgacagctggaccatagcacctctgggccccagcctaggcagcgagccagtgtccctgcatctcctacaggctggccaggtcagctgtgtgcggctgcagtgcccaccccttccctgcaagctccaggtcaccgagcgggggagctgctgccctcgctgcagaggtatggccgcctgtagccctaccccttgcttcagccccttggccctgtgtccctctgtccaccccacctccctcccctcagccagctcttctcccacctccctgccccaacaactggcccttgcatacacccttgccaccttcagcttctcctacctctccctgtccgggactgcccagaccatccctcttccaggtgctggttagagttccctcaaagctgcctgtcttgggctgggtgcagcggctcacatttgcaatcccagcactttgggaggccaaggtgggaggatcacttgaacccaggagtttgaggctgcagtgagctgcatttgcaccactgtgctccagcctgggcaacaaagaagactctgtctaaaaaataaaacaaaaagctgcccctcttcctaaccacaccccattcatcatcatcatcatcatcaccaccatcatcatcatcatcaagatacctgacattcagtgagcaggtagcatgtgccaggccctgagcactttacgtgtattatctcatttaatcagcacaacaacttaccagataagcactcttagtcctcctattttacagacgagaaagtggaggtacagagaggtagagaaggtggcagagtcaagatggacacttggaccatctggctctgaacttgagcctttcttagcctgcccactgccccctcgtcccacaccctgcgcagtgtggtggtgtttctacagaaccacagaactgtcatagcatttcacttgctctgggagggaggcaggacagaggaaatccccatttaacagatgaggagactgaggcccggagagactgagttaccttgggcacatggttagcgatggagccattcacctggtccacatgcatttatgacacagctgctgcatgccaggtctgtggccggtgcgggctgcactgggcagtgcctgctgcctggagcttggtcttgagagcaggtaggaacagaacaggattagaacccaggtgttctgaacccctcccagtgcctttcccctccacaacagacaggagttctgccccatcgcaccttcccgccatatccctgcaaactcactcctggcgccacgtgcctagctgaccactgagggtgggggccaggagcagatgtccagatctcaacctccgagctcgtccctgcccactttgcaccacaggctgcctggctcatggggaagagcaccccgaaggcagtagatgggtgccccccgacagtgcctgctcctcctgtgtgtgtcacgagggcgtcgtcacctgtgcacgcatccagtgcatcagctcttgcgcccagccccgccaagggccccatgactgctgtcctcaatgctctggtactggaagcctggggcgggaggggaaaggcgaggagggagccctgggcccacacctccctgccgctgctgggccgggtggcagagacaggcagttggagaagtggcctccgtccttgtgcacactccactccctgggatcagggggaggctggagatagaggactccacccctgcctcgctgccagcctgaaggacccctggtcccgttctgctctcactccaccccaaagactgtgagcatgagggccggaagtacgagcctggggagagcttccagcctggggcagacccctgtgaagtgtgcatctgcgaggtaggtgagggcacagtggtggggctggggcacctcgtcgggggggagtgggcagcatgggatgaggcccagccaagctggtcactgcatggagcaggcactctgggggccaaaggagtgtatccctgtggccaggagacaaggcagggttggggccaacagggccaggaggtctgggtttagacaaggagcgcaggttccaagtgtgcaggaggccgtaggtggcccccctggctgcagtgcagggcgggtgtgtatggccggagagccacctgggacgtggctaggggtcatattgtggagattctatttgcaaggccatggaagggcttggagcaggcaaatgacatcacaggtcagggtactaagccatgggcctggggaggaggatggcatgagcctgccggaggatcaaaggtcacatgagggctcaggcccaagtgacttaaaggagaaggagacatcatctcagagactagggcatggggtgaggagcacgtctagaagacactgagtctctcttcagccttgagttcagggcccaagacatgtcccggaagaggctgcagcaggcagagggaggggccggaagtcccggccaagggcagctctgggtttttgtggcccaggacccaccgctgctcactcattcttgtagccacagcctgaggggcctcccagccttcgctgtcaccggcggcagtgtcccagcctggtgggctgcccccccagccagctcctgccccctgggccccagcactgctgtcccacctgtgccggtgagtccagggatgtgggggtagatgagatatgaggttagggctgccaccccctgccgcccttcctcaccagtcccagccccagattcttcctgactccagtggactgttctggaaccctatgcctggccggcgagggctgcaccatccctaagggaactggggaagctgacaggaaccctttgcctctccgcagctgggtgcagtttgtggagcatcttggccagcaggtggcgctgcagggcgacagttgtgctgagacgtgaggcccaggcaggcagggggtagcccagccacaggggtgggcgagctttttttgttgtcgttgttagagtaaaaatttattaagattggggggaaaagtaaagaaacagttttatttttattacaaatattgaaagatggccaatttctgtctcctggatttaatagttgtttacctaacacagccattttacatttgttgtggagggaatttttttctgtttctggtcctataccaacactgaaatgataacctacctttgcaatacaggtgaacgttatccttacatagaaaaaacaggccgaggttggtagctcacgcctgtaatcccagcactttgggaggccaaggtgggaggatcacaaggtcaagagatcgagaccatcctggccaacatggtgaaaccccgtctctactaaaaatacaaaaattagctgggcatgatggggcatgcctgtagtcccagctactcgggaggctgaggcaggaggatagcttgaacccgggaggcagaggttgcagtgagctgagatggtgccactacactgcaacctggcaacagagcgagattctgtctcaaaaaaaaaaaaagaaagaaaaaacatacttttttttttaatgataatcctattttctccaatttggtttttttatttgggttttggtttttttgagacggagtctcgctttgtcgcacaggctggagtgcggtggcacaatctcggctcactgcaacctctggattcgagggattcacctgcctcagcctcccgagtagctgggattataggcatgcgccatcaagcctggctaatttttgtatttttagtagagatggggttttaacatgttggccaggctggtctcgaactcctgacctcaggtgatccacccgcctcagcctccgaaagagctggattacaggtgtgagccacctcgccgacttttctgttttttgtttgtttgtttgtttgtttgttttttatggtggtaagacactaaaatgtacaatcctaaccatttttaagtgtacagtttgtggtattaaatacgttcataatgctgtgcagtcatccctggcatccatcagggagggctgctctgatcaacacttgctagggggtgcttcaggggaagggaagaagactaacattgattaagcacctgttccatgccacagactgtacttggtgctcttaataaagtctctcgcttcattttcatagttacccagtgagggaagtattattaatctctttttacagattaagaaactgaggctcagagaggtggattaatccaacctaataagcacaggcactgagtgctggcatcaggattcgaacccgggatgcctggctgtgtgcttccctgcgcagttgtagccacactgtattacagatagcgggagggagagcaggccgcagactggccatttttagtgacctcaggctaaggaagccatggttggtctgtttccagtcaccttgcacccccacccggccccaaataatagcctagcaaagtttcttttaaaacgtgtaaacttgactgaattgaagagaaagaggacttatcctccctggagtcaaggtgctgggatatgggtatgctcaggagttcgagttagaaacctggggacacagtgcatggggacagctgggatttccagccctgtgcccctctttctgtcccgcactctggattcttgtcttcacagaggccttgagtaactgttcagagggcctgctgggatctgagctagccccaccagacccctgctacacgtgccagtgccaggtgagccctcctgccttggggactcacagagcccctcttcttccttctctgtgggctgtggctgccactcctctcccgcagcagctccagggctctccattcgccctgacatttgcccacttgtcctgactgtcacatcctgcctatgccttactcctccaccagctccctgagatctgccattctctacctcttgtgttcacatgggcaggacctgacatggctctgcatccaccaggcttgtcctgagctcagctgtcccctctcagagcgccacactccccctgggagctgctgccccgtatgccggggtaagtgcccagccttggcctccaccctcagagaggagcccagggggaacacaggaaggggaggcattcatgggccaagcgggcagcccagggtttgtactcggtttctagaacagaatgcagggttcattcttttctagaaatggaggggggctgttcttgaggtggagaagagacccatgaggcagggggaagctgggatgaagcctagattctcaaggtctggcctgatgcctgtcagggggctcaggatccccaggcccatgaagagggcattgcactgctgagcgggcagctggcccagagtggggttccagcctctggccctttgggctcctaggaccctagagacatcctgagctctgatgtgaggcctgatgtctaataggccctgtggatattggctgaagaaatcaacaccatcagggtggtagggacacggagtgggtgctttcctgccgtgaaatgctgggtaagctccaaggagggaggatacagcaggagggacagtgcctgcccatcccatgtctcccccctcagaatgtgtggtggaggccgagggccggagagtggcagatggagagagctggcgggaccccagcaatgcgtgcatcgcctgcacctgccatgtgagctggggtgggcctgggagggtggaggatctcgcagatggataaagggaggagtgtccaacactccaccagcagatatggggtctttaagggtcaggggcatccctgcaccggggcatggagccgaaggctggatttcattcccctcttgaactgtgaagaatgtattgtgggaggggcaggcagaagtccatgcccagaggcccccagaagcatgaggctggggactccggccctgcagaaaaccccagaacaatgatgtctgtcctcagcggggccatgtggagtgccacctcgaggagtgccaggccctctcctgcccccatggctgggcgaaggtgccccaggctgacagctgctgtgagcgatgccaaggtgcgcagccagggtgatgggggaggggtaagccagaccttctgggcatgtgggaggagcagctgaccctcccagctcctatcccttcagctcccacccagtcctgcgtgcaccagggccgtgaggtggcctctggagagcgctggactgtggacacctgcaccagctgctcctgcatggcgggcaccgtgcgttgccagagccagcgctgctcaccgctctcgtgtggccccgtgagtgccgcaatctaaaatggtggggagggtcagggtgggggcacatggtaccgccatcctggtgtgaccaggcatcagagagggaggctgggctcctgccgccagctgggagctggggacagtgctgttcccagtgcgaccacgawgtggtgccctgacctcactcacagggagcctgggagccagagtcctggagatccctggagactcctgggagatgcttggttttctgggagggtctgcgagaggcatggcggggagggcggtgtgtctgacagtgtctggggctgagtgcaggacaaggcccctgccctgagtcctggcagctgctgcccccgctgcctgcctcggcccgcttcctgcatggccttcggagacccccattaccgcaccttcgacggccgcctgctgcacttccagggcagttgcagctatgtgctggccaaggactgccacagcggggacttcaggtgtgcatcccctgtctctcttctccccaacccctacacccagccctgctgaccattggcacctgggactttcctgcccacagtgtgcacgtgaccaatgatgaccggggccggagcggtgtggcctggacccaggaggtggcggtgctgctgggagacatggccgtgcggctgctgcaggacggggcagtcacggtgagcaaagccgaggagtggaggaaggtggatcctgtgctgtccacccatgtgcctcgacatcacccctcctcccacctcctttatcctccaggtggatgggcacccggtggccttgcccttcctgcaggagccgctgctgtatgtggagctgcgaggacacactgtgatcctgcacgcccagcccgggctccaggtgcggctccagggcgagtctgggtgggctgcctgctgggagcttcagtcctgtttaggcctctgtatctgtagagggggtggggatgccagctacctcctagccaaaaaaggcaaggagtggggtacaggggtgtgaggggaggtggatcagggtcagagatctccccaggcagtcagaggagttctgagttctgagcccgatttctaatctcggctcagcctcttaagccaccaccagcctcctctgggccacagatttctcgtctgtaaagtggggaatgggaagggtcagtggcagtggggaggatgtcagctgaagtctcctgggggggtgtctcaggttccttccaactctcatgtggaagagtaatttgccccctgcccccagcaggaaacacaactcgtaaattcgtagaataagggtgtacacttctaatccggaccctaattgtgctttgtcctctgcaaggcccgaatgcccatgagaaagtgaatccccggaagggggttgcatttcacctggggcccagtgcagggatggcagcaggagaaggtgccctcatgcaggagctgtgggcagctcctcctgtcatctgtctttgcccagggctggcacagaatgtatccacttggccttggccagggtggtgtttcttccaaggggagcctccacctgtccattctcctcccctacagcactggccgcactgaacacagtgcctggggccatgatggaccctgggcttcttaaggcccctgtccttccctgctccccagtctcaggcctctccacacaggtgctgtgggatgggcagtcccaggtggaggtgagcgtacctggctcctaccagggccggacttgtgggctctgtgggaacttcaatggctttgcccaggacgatctgcagggccctgaggggctgctcctgccctcggaggctgcgtttgggaatagctggcaggtgagtggtacaggaaccggggatggggattaggggagacgcagctgagcatgagtctcagagcaaccctctggcatggaaagcagggaaggggggcgaagtcacacaagataggcttttgggctttcagggaggtgtgggggcttcttgcctgtcttggtgctggagaggtagggtggcttgtcaaaagaggcctcattggccgggcagggtggctcatgcctataatcccagcactttgggatgccgaggtgggtggatcacctgaggttgggagtttgaaaccagcctgaccaacatggagaaaccccatctctactaaaaatacaaaattagcccagcctggtggtgcatatgcctgtaatcccagctactcgggtggctgaggcaggagaatcacttgaacccaggaagtggaagttgtggtgagctgagatcgtgccactgcactccagcctgagcaacaagagcaaaattctgtctcaaaaaaaaaaaaaaaaaagaaggcttgttacctgaaccctcaagccttgctttgccactcactggctgtgtgaccttggacaagtgctgacctactctggccttggtctgtccttctgtaaaatggggacaaaaagaaggtagacagtacttcatttgctgttcttttagggaggttttggggactaaagcaaatgactgggtgggaagtgctttgaagagcacggcatgcagaggccagctgccagtggtgctgtcacgtcagggctgctctccccacccaggtctcagaggggctgtggcctggccggccctgttctgcaggccgagaggtggatccgtgccgggcagcaggttaccgtgccaggcgtgaggccaatgcccggtgtggggtgctgaagtcctccccattcagtcgctgccatgctgtggtgccaccggagcccttctttgccgcctgtgtgtatgacctgtgtgcctgtggccctggctcctccgctgatgcctgcctctgtgatgccctggaagcctacgccagtcactgtcgccaggcaggagtgacacctacctggcgaggccccacgctgtgtggtgagggggtgatgcccgctgcaggttgggggaggctcagcacaragaagaagggcagcccggagggctcagggcaggaccaggccgggtatggcgagtctcgcaggggtacgcacagcaactggggcagtttcaggtgccttggtaaccccgcctcccactccccctgcagtggtaggctgccccctggagcgtggcttcgtgtttgatgagtgcggcccaccctgtccccgcacctgcttcaatcagcatatccccctgggggagctggcagcccactgcgtgaggccctgcgtgcccggctgccagtgccctgcaggcctggtggagcatgaggcccactgcatcccacccgaggcctgcccccaagtcctgctcactggagaccagccacttggtgctcggcccagccccagccgggagccccaggagacaccctgagccaggacagtgcctgataagggttcatcaggccaggagtctccccttggcgagcagttcccaccctggttagggctatggagagaatgccctgcctggacactggagcctgggcccctgccctgcaaagacccccgccatgttgagtcacnagcagtaaactctaggcctgccygaaggcttccttgtgtgtgtgtgtatttcctcctggtgctgggacagaggctgggctgccaggaacatggggtccagtgatcagtggccgcagaatcacggcaccatgcttactccttgcacctgcatgcctgggctgccccacccagccactccctggtgctgtctgggaaaccctgcagtgggtagraggaggaccctggtgccctggtcttagccctgtgctcattctgtgtagcaggcatgacgtgtggccccatgtggtaccttctgtggatccatgtgggatcctgcaggggctgaggaaccacggagaaggggctgcatcagagaatggcctcccccttccttgtggcttggggatactgagtgtgcaggcaccttctgggccactctgagagctagtgacacagggaccctatgcctggggtgagaaacagaagcaatagaccrcaatgcagtgtggacatgtacctgcgtgtgcacacagaaacacacatccctcagaaacccagataagcacgtgcaatgcatacctgcctgccttcacagccacacccaccctgggcagacatatgggcagtagacactggcagcatgtaaagacgtcactgtagggagggaacatgggttttgagatagaaaaagtccagaattcaagttttctttgctgcctaccagctctgtgaccttggtgttttagggaccttggtcatgaggtcaggggactccatcctcattgctccctgctattccaacagggagtgaagggctttgtgctcaggcaaggacgcaaaagagcgccaggttgaattggaggccactcagcctgattgctctttcattgacgctgttttctcttctggccaagaggagggtctgctctgttctctcacggaatggggacaaagtagccagcaggcaaatctgctcacgacagggcaggatgtaaagatggcagagctcctgcactcagcccctctcctgattagataacttaaatgacctgtctattcatctgcgagatgaggatgatagtaacaagcgtctggtatgtgttggggaatgaacagtgatgcatggacagcacttactaggtggacagcatggataagcatgtgggtagtgctcgctggggcagggcctcttaccactcgcctcttgctgatggacggcctgggctcccgggaccatgtcttcccagagggtatcacatccatccatctccagaagaaaaaaatgctgccacatgttaagacaagctattccttttttttttttttttttttttttttaagagacaggatcttgctctgtcactcaggctggaatacagtggcacgatcacagcttactgcagctttgacctcccagcctcaatcaatcctcccatctcagcctcccaagtagctgtgactacaggcgcgtgctaccacttctggctaactttttttttttttttaagaggtggggtcttgctatgtcacccaggctggtctcaaattcctgggctcaagccatcctcccacctcatcatcccaaagtggtggaactgcagatgtgaagcaccacacttggcctaggagaagttgctttctgagtcagtcttcttgcctataaagkggggataataatagagcctgcttcatagagttgctgcaaggaaggattatatgtacgaagcatcttcattcccgcacaagctaaactgttggtagcggctgctgttgctacccatattgggcatattgtgtgcccaaataatgcagctgtgtggttgatgtgcatatgtatgcttgtacagtatatgtcaaacaaatgctcactgggggctgtaaacaagcatatgcgtatacctccctctttcggggtcacactgctcactccacgctgccacttgtagggccataaaagccatctcagagacaggtcagagtctatgaggcttggccgccgtccagccagggctcaggtgtcaggccctgcatgattgagatcagagcctttgtccttccttgctcctggctcttggtttcctgtcctccgcttccctccaggctccgcatggtgcaggcagccaccccgggggcctcagggctcccctgcagccccagacaggccttggctttgtaccagtatctcttctggtgccccgcaagcccaggccagctcagggctgcactttggcaggtgagggaggggcactgcctcagaaggaaggagacaggcggggacctgacaccatcttgcccctccaggtgcaagagggccgcgggtrtcccccagggctggagctgccccctgtactgctgcagatggagtggagccggcgggcccaggagcaggtaagggctggctgggggtgtggctgaggccaggrtgggtgccccctcacgccctggcaccccatcttcctgcagctcctgtgggacttggaactgctgactggtgtggagctgggcctcttctggccaccccaggcccagtttttcggtccgaggggccaggcccagcaagcatggagccagtgctgtcagccaggtggtagcacaggtggggaccctgagcagccggtgagtgggtgagggggcacggcggggacagaggttctgggaacactggggccctgctgtggtgagggcaagcggaaggggcagggttttagagacagggctgggtttgaatctccacactgaccacccccgtgggctctgagtttacctttcctcagctagaaaatgcccacgaggccaggcgtggtggctcacgcctgtaatcccagcactttgggaggccgaggtgggcggatcacctgaggtcgggagttcgagaccagcctgaccaacatggagaaaccccgtctctactaaaaatacaaaaattatccaggtgtgacagcatatgcctgtacctgtaatcccagctactcaggaggctgaggcagcagaatcagttgaacctgggaggtgaaggttgcagtgagccgagatcgcaccattgtactccaatgtgggcaacaagaaccaaactccgtttcccccaagccccccggccaaaaaaaaaaaaaagaaaaaaaaagaaaacgcccacaagaagagatctttctctaagggctgtcgggaggaagagtggactcatgggctatgcctggcacacagggcctgctctttccaggcaggccgttattctcattccacagttaacaactgtcttggtcaaatcacctgtgtggtgatatctggaagcctttccatgttaccgcagcgtgggaggaaagtagcctggcagggccccagagagcaaaggcactgatgcccagtgtgcgcctgagacacaggggctgagagccccagccgctggcccctccctccagggctgcagctgggctgagcctccaggaggggggtgctgtggtgactgggcccagaacagagctgggaattaggaatgtgggtcccagtcctggctcagccaccagctgtctgagttactttgggcaggttggtagccctctctgggccaaggcactctccactgtagcaggaggggtgttcgtggtgcaacttaggaagggttcagccgacgtcgctggaaagaactgtggtctcatctgaggctcaaccgggcaggagggatctgtttccaagctcctttgcatggaggggaagcaggggtcacagagggcatgaattccaggaggcagggatcatttaggggccattttagaggctggctgccacactgggggatggagccctgtggactagggtgcccccaaaccttccaaaattctaggctgcatcctctaccccaggacagggactccctgagccagaaccatcagctcctggaggggtgagtctccccggggaatcctgcctttccctctgtgaactgggctctttccctgtcaccttctgcagtcctgcccggtgcccctcattacgcctcctgggctcttagttgcacccatggttgccccacagcccttggaaaggttaacctccaaactccagctcccaggatctggtgatgggggaggagggagggtactgggggcggccacccgggactcaagtgtttggatgctggggtgggggtctcgggagactggcaggcagactccctcccattccagagccsatgggcccagagaggtgcatcagaggtagcccttgaactcctgtagggggcaggccggagacctctcatcagccccagatctgggtgaaaccgggagyggtgcagaccaagggtgggagagccctggaggacctgcagagcccacacgcggtacgtcatcrgacagccaggagggcagggggcccctggggctggggcagccagactggattgggatgaggcaggaaagtcctctccccaagtcrcaggacttcattcttcactcattcgtcatctcacacttcctgatgggaatgccgggacacccagcgatggcaagtaggttttatttgatgtgccaattccacctggttggtaccagctgtcttaggcactgtgtccagtaggattctgatgctaaactggggttcaggggagaaagttcaggaatgagcatcactggctgcccggggatgagggaacagaataccaactccaggccacctatttgccacccttcagccaggcacaggccacctgtttgccacccttcagctgggcaatggagatatacagagaacaaggagactaggtgcttgtctttagatcacaggctagaaatagcatgacaataaacaggcagcggaatggatactgtgagccttgagcctattaatttaaatgaaacagactctcaaattgtttgttaaataatagatctagcaaagccataagctttttattgttccatcatgcacatgagagagaagaaaagtgccaataattattttctgatggacagagaagtttttacaagtattttacatcttgagaagacagggatatcaattataacattattaccagagaaataaattttctagtaagacaacagatgagaattacagaagtgggaggttggagattgtttttgcagtttgtggcaattatttctaaaggcccaggagtctcctttgtttaaaaaactctttgaaagatgcgttttcacagagagtgcacccatttggttactgttaggaatattcacacgtctgtatattgcacaaganaacaagatgcagtattcttgggaaagttctcaatttcagaccttangaaatcccttttaactggtttttatggatgcagaacagctctccttcctccacagctgcaggggagcggcaacacatcatctctttttttagatntcttttgttaattatgaacacttgcagtttttaggccaggctctggcctaaaatttcatcttgaatttcctttgattttgctgtcagaaacaaagaaaaggctaaggaaggtttttctgaataagagtaaaaagtaagacgcccagagcrggtttcttctctgggcctgatgggcacaccagggcaaagtgggagtggccggtgctgaggaacccaggcacccagcaccgtgacccttctcactcccaggcctcctgtggtggtcttgaggaaggggctgtgcaggtccctctggagtggtctgccttggctgggaggatgagaaagatggggcaggctgttggcaggcacacctgacaggtgcatggctggctgattgatgaactgtgacagcctgaggttcagacagcgccctcagggcacccctagccatgcactgggactccctaaacttcctggctctagtctaggtgaactgtgcatgaggggctgggacatgagctcccaatactggtctttcttcctcaggctccttacaagagctcaaccccactaccaggaggagttttggggtgccaggtagctcagagtgcaaggtgaaaaggtcaagggtctcaggttggggatggcaggggtgggtctgcctgggaggaggctgctggggtgaggaggaggctcttcagtgaagcaccttccacactacataaaatggctttaacaaattcaggaatcaggcaaaggctggcccctggggtctgcaggttccctctcaaacctgggcccaaagtgcttttcctttccaggacctggcccagagggaagagaggagtgaggcagagcctragacccagaaaagaaagctcactcccgggacccctgggccgggggacctkccctcccaaaacctgccttcccaagatgcccttgaagggctgggctcggacccgcacctgggccaggagagagcagaacttcaaagaccaccaaggatggacacccctgagtctgagaggaggaccctcaggatcagaaagcrgagacccctcagcgtaagagagccgaggcctcctggggcgagatcaaagatgctcctcagagtcagaaggtgaagacacacgggggccagagcccaagggctcctcagggtcagagggaggagtcgaagagaatttagtcctaagtgccagggaaaggcgagtccccagagtccagggaagaagatgctgcggtcttgggaaggcaatatctcacaagcctgggaggtggctccyggagaggccactgtgcagcccccagaggaaggcsacccccatagccatccgagggactcctgcgggtccctgaaagcacagactccaaagcctgtgggcagggagagcccaaacctccggagaaggactaccacgctgacgcagagcatgatcaaaggcgagccacaaaggtcggcaccggcggtggcaaagctgggggccgcccgggagggggcgtgggctgcgcttacccgcccgaagcccccggcccggcggcggctcccaggtcgcggagccggagccgagatgccagcgaccctgcgcgccgaggtatccgggcagcaggggctcctcggggctctccggggcccccaggcctggagcgcgatccgcacgggctgcagggccctggagtgggccccgcaccgggggagcaggaggtgggccaggcttggcttccgggtgccctccggggtcgggtggggcggccctgagcgtcccaaggccttgaaggccgcgtggccggcgcccctcagcaccgccaaggcgcctgcgggcttaagcgcggcgcagcaggtgacggctctgcagcggctgctggagctgcacagcgcggccaggcggcagcgccgccggcgggaccgtgagcagcagcggctccgggtgtgtccccacgccgggatcggggcctgcctggagcgggcggggcaccgaggggcggccggacgctgactgccgcctctgcaggtcctggaacgcctccacatcgccaggaaccgccactgccgggttcaccccgtggggctcccgsccagtccggctcaactcccgccacaggcaagacccctagaaggcggtggggccacaaggagcctgcgcggggcaggggccgagcttagcgcgcccgggtccctttgaagtgagcgcactgcactctgrcagtgactcggcggggckcgaggggcaggtgtgccaggtgctgccccgcccgccccactgagccgcggacgctcagcgctcngcacckccaggaggacgcggctgggcggcggcgcgccctgcgggagcagctggagcaaatgcatcgggagaggacsgagcggctgcgggccctcngggccaggtgaggggcsggcaaggaggggtgtggcggtggcaggaggcccctttccctggcctccgaaatgacaagccgctctctccccrggaacacccagaacttcctggaactactgtgttcccctggtgctgaggatcccgtgcctgcgaagtagtgctcgcccttcccagnnccctctggtcattgctgngtcctcaaagggatgattaaagwgatgagggttacggaaaaagcaagagggcaacttgcaggtcwgatagtttcagaaaggcctgaatgcaacctcagggacagggagagcagaggggcacagacacacacagcagctttgccccaccaggaggcctgttatttcttcttccctcccctaagcccacacckggcccacggtcagagggccaggtctcggggatcaagcagtgcgaaggccccgttcttgcggaagaatgactcaatgcggcacatcttgcaggagaccagttcttgcttcactggggggcctgggaaaagatgtcagaggccaagcatgggttcctgagggagggacacgcagagcatgggagccctgtctgtctgcacagccctaggaatccgtcagtggagtagccactttgtgggaagaaatagaaagtgctttggaggaatgggagctatgggcaaatactgggagctggctggatgccaggatacagcagccatctgccatcattaccctagcttcaggatcctctacctgcagggaggggggccaccctagcctgcttgtcacagggacagactgtggagagatgagatttccttcggcctcctgctccccgcttctagggctcgcctcctgcttttgttagaaagttatttccctgacttcccctttaggggcctgggggaaagggatgtttgggggcaaaatctcaactgagtcaatccccaaccayccaccttttctgcaagacactcaagcagctggagaagggtacagggctgaggagtctcacttgacattcatgagcacagacagcaatgggacgtgcagcaacatcgcccagcagccctgcctggcacatgcctgttccacacctttcctcttcatctctagttactccactgcctcagctcagctccctccccgctgatggccttgactcaacctcacagaaaaaagactcagccgagatggacaggcttcctgccaatgacatcccctacccsctctggctcagccctcctgcccccactcccatcagattccagcaacttgagctccctaggagatctcatggatttaaatagcacctataggccagccggtggctcatgcctgtaatcccagaactttgggaggccgagacaggcagattacgaggtcagcagttcgagaccagcctggccaatatggtgaaaccctgtctctactaaaaaaacaaaaattagctgggcgtggtgacacacgcctgcagtcccagctactcgggaggctgaggcagaagaatctcttgaacctgggaggcagaggttgcagtgagccaagatcgtgccactgcattccagcctgggtgacagagtcagactgtttcaaaaagaaaaagaaaaaaaaaaagcacctatattccaatgacctccgaatttgcatcttcagctctgacttcaatccagacttatagacacagccaccctacagacacttcaagcataacatagccaaacacacatggctaaayaggacctgttcatgcacgctccagccctgacctctcccagtcttccctgtcactgcagctttagctaaacaaacacctgggtgattgatctctcttccccttattctcacattctatccatgggtgagttccaccgagtcttcccccaaaacatcctgaattgatttcagctctattgctgatccctcaggccactaccacaggrtaaccaaacagatgcccaactcatgtgccagattctaccatttcccctgaaaaagccactgcctacatacaggtcagggtgactttttaaaaggttcaccagtgtcactcttgaaatctgcttagaaccctccatcagcttccctgcacaacaaataaaatccaaacccatccttatcatctggctctcagcctcgggtcctcagaaaggcctttcctgacaatccaataaatagcagcacgtggccgctgcctccctgcccaccgccactccctagttctgtggaacgtgtcgacacttcttggccatctccttgctctgtttatrgtctggacccttcaccaggatgcccactccctagcacatggctagtgctctgtttttgaggtgatttccaagaggttgggctcacccagctgccagccatacgtgaagctggtggtgatggggaagaggtatcgcgtctctggcatgtccagttttcgagtgttgaggtagcggtaccgcccctggaagtcgtgggagatgccttcatacagcagggctcgggtgataggtggtaccgggtacatttccgactgaaaaggcgcctctgggacagggctgggcaccttggaaggggctgacttgggggcgggtgggggtgagagtggggctttggggtgcagggtgggcagtttgaggggcaggcgggctgcagccttagccttctgcttggccttcaccatcgacccatacttgcggtaccattcacagcgcaacatcttttccctcagatattcctccttccagaagttctgccgtaacgcgtctatgttgagctgccgtgacatggtggccagggaaggagtggcaccagggtggccacagctgaggggtgagcacagcaagcagagtgcttctgacggcgagtggctgcccaggcacagtcacctggcaaccatgcctcacctcacacagggccagggttctacttgccatgcccccagcagaccccatgagcctggcttcctgaggcagcctgaggccagggcccrctggttaagagccctgctccccccaaaactcccgcagggccctcgcgggatctggcatcacagactcccaggtttcgtgtgctttctgcttctgtcctttggatctggcccccttcccagcccaatgccgagcaaggtgggggaagcaggagctgggctcaagcctcctcccattcctccccagaccagagctggtcttctctgatccaaggaccagtccttgagttctgcctcccggcacaatcctcctgggccacctcttctatgcctgtctttggcagcaccttttccatccttgccaaccgaatctgccccatggcctcaccccacacatgtcctttccagcacccaacccatctggagagaagcaagaatatgactttaatttaacatcaacaatgacactgtgtaacagcacaggraagaggtagtggagrgagatggtcaggcttcctgttccttaaccagcagagccccagcaacctaraagcgcctcacctagcctcttaatggagtgggaaggagcagggaattggaaatcagaggctcaaaaagtaaagaaggctgatggcaagcctggggagaggcctggaaamgagggaagggctgagggctatgaggagtcccctagcgcaggtcttcggsagtgaacatgcccctggccctgcgcaggatggagtccttggcggcgtcatatgggtgctccttggaggggatctccaggacagcggggatggactgctggtgggcgtccagggcatgccgcaccatctctgcgatgtactggttgatgaggatgatgccaatgtcatcccggtttagaaattgcctgtggggagagatgagaagggagtccaggacagctctgggggctgccgtctctcctacccaggcagccctctccgagttgttgggctgggctgtggaggggaatgagcatgacccagagggcacagaggacaaggggaaaggctgccacgctcaaccctctgtcaaccctacctagaatcaatttcatcccaaagcggagggtcacgctgattagggttggcttctacaacactgcccggaaggcttccaagtgaactggtaatgaagattgattagggtgcacactggtgtattcaatatgcagtgatgtgtcagaaaggggaaggataagattatatgtatgcagatccctttttatgtgcagatactgaaggccagctgtgatggctcacgcctgtaatcccagcactttgggaggccgaggcaggtggattgcttgaacccaggagtttgagaccagaatgggccacatagtgagacccccatctccctctctctctctctctctctctatctatatatacacacacaaaaaaatggctggatgtggcggatctatctatctatctatatatatacacacaaaaaaaaaatggctggatgtggcggcatgtgccagctacttgggaagctgtagtcctagctatttaggaagctgaggtgggagaatcacttgagcctgggaagtcgaggccgcagtgagctgcgatcacgccactgcaatccagcctgggtgacaggagtgagaccctgtctcagaaaaaaaaaaaaaaaaagacacattaacttttaaaaagaaaacaaattatttaaaaatagggctgatgagaccactgaaggcctcaaggtctatcctgatgagggtggtggaggggtcagagggaaagtttggcatgaacyaagatcacaagctaggaagaggacaccttgatgaaggaatcacactttctgcacaaaaagaacctggccttgtgctccttctctcctgtggtcacccacccattcatttgtttattttatttttatttttttgagacagggtctccctctgtcacccaggctggagtgcagtggtggatctcggctcactgcagtctccacctcccaggttcaaacaattctccttcctcagcctcctgatttsttgggattacaggcacccgccaccacgcctggctaatttttgtatttttagtagaaatggggtttcaccatattggtcaggctagtctcaaactcccgagctcaggtgatccacccgcctcggcctccaaaactgttgggattacaggcgtgagccactgcacccagactcattcgtttatttactgattaaaaattacttactgagcacccaccccctgccagtcactgggttagatttgatctctgaggtcccttttggttggaaacataaaaaattcttgaagtaaaatttgtccttctcccatgataacttgggtcactttaccagacagcttagagawtggcagataacagcctcccaggtcagggactacctaatacaccaggcagcaggaaccagtctcagccagcagccctgggctggactgtttgggggaaacaggtgagtggtttattcctgagacttggtacaggggccctggagaaggggtgaggaataaaataggaggctggtatccttaattccagtcaccaggacccctggtggattaaaagcatgcctgcacccacactctgacctaaggcaggcagtgagggcttgagtgcaaggtcttagcagaaggctctcacagtcccgacatttctgcctactgtgctcaagactacaaggaaattccgaggccgcctgaggagacctgccaagagtgtgtacctggcttaccggaggcagaaagggttgrgattgggttcaaattctagctctgcctctgccgactcgtaactttagtgtgtgccttaccctctccgagctttagttttctcacctgtgagtaggacaaaaatcatccctgccttacgggacgatggtgagcctctaaaggaggagaaagcagaacaaagtccaagcccactgtctaggctgtcacgagctctgttccccttctttcatgacacacgatcatgtgaggtgggggggctcgtggacctgatacagcttctgtcccaccgagccccaaacggggacttggggcgcggaggcctccgctccggaagggcggaaggactttcaggatcgtcccctcacccccgtccgggcagcctccagcctcgccccgcactccaccgagcagcagaagggcccgttcaggcctcgcgcggtaccgtaccggaaagtgtcttcgatctcattgatggttgtatccttctccaccaccaggaaattgggatggcggttcttgttaagctcccctatgmcgcccagcaggaaaccagtcaccgtgtcctcgtctccgatcactgcgrtgagcttacccctccccgccatccctgcagccgggcagagmtcaccctagagcaccagaagccactgaaaccccgcctccgccgtacggcgccccgtcggcctcaacccccacccttcgagcatgcgcagtcctcccagccgcattccgggacatgcgcattaacagcaacacggcctccatgtgaatacgcctgcgccgtaaagacaggcccgaaccaggggactacgattcccagaagaccgcgcggcaccacgtccttcgcgggcattcattcgttcattcactcgttccttggttcattcgttcaacaagcgctttggacctgacgctgttagacgccgagaccccagagaagagacgcagttactcatctcaagggcagggtctgggtctttatcgtgtatgtatgtgtgtaactatgacacatagttaacaagtaacacacgtttgttcagttaaaggamtgcaaaagttaatgatgatactgcctagtgaggtggaaagtcaagggaacaggcgactacaaagctgtgtgttaatggttagaatgtgaaaagtatatggaagcacacatccatggtaactaacccatggagagagggggcgtccaaagaacccttccccaagaagcttgcttcagatctaagctgagacctgaaggacctgcaggatgaaggggatagaagtgaggacaagacggtgttctaggcagaggaacagcatgtgcaaaggcgtactgactagagagcgtagggccttcaaggaaagttaaataattggtaaggccaggcatggtggctcacgccacacctgtaatcccagcactttgggaggctgaggcaggtggatcacctgaggtcaggagtttgagaccagcctggccaacatggcgaaaacccgtctctactaaaaacacaaaaaattagccgggcgtggttgtgggcgcctgtagtcccagctactcgagaggctgaggcaggagaattgcttcaacccgggaagcggaggttgcagtgagccgagattgtgccattgcactccagcctgggtgacagagcgagactctgtctcaaaaaaaaaaaaaaaaaaaaaaaaaaaaaattagccaggcgtggtggtgcacacttatagttccaggtactcgagaagctgaggcagcagggcttactcaggagttcaaggttacagtgagctatgatcacggcactgcacttaaacctgagcagcagagcgagaccctgtctaaaaaaaaaaaaaaaggatctgcaggctgggcgcggtggctcacgcctgtaatcccagcactttgggaggctgaggcgggtagatcacctgaagtcaggagtttgagaccagtctggccaacatggtgaaatcccatctccactaaaaatacaaaaaaaattagcccagtgaggtggtgtgtgcctgtagtcccagctactcgggaggctgaggcaggacaattgcttgaacccgggcaagggaggttgcagtgagctgagatggcgccactgcactccagcctaggtgacagagtgagactctgtctaaaaaaaaaaaaaaaaaaaaaaaaagatctggaagttatcctgaggacagttatcctgaagctgctgagggatttcaagtaagagagtgctatcgccaaacttacgttttagagctgtcactcactgttgactgtgctgtgtgcagaggcgaaactgagggaggagaaaccaaattgggaggccactgtgagagataatggtggccaggactcaggtggtgataatgggaaacgcagagaagtaggtagagccgagagatatttagatatttaggacaaaactggtttcagagtggatgtgtttggggagtgaggtagagagagagacctgggtgatttccaggtttctggcctgtgcagcacatggatgggagtaacattgccaagaaagtgacctctgtaagatgagcaggctgaaggggaaggagccactctttcctcctcccttttaacaaatcagcactcccggtgtctggcatggggtttgtgagtttggagtgcttgagacgtgcccgtggtctggtctagcgattgtatgtgtgataagcttgggattcgggcacacctgggtttcaatctgtgccccactacttaaaggtacggtttcagactcatcactgaaattcccagggccttggtttcttcagatggtagtagccccacctcatagggctgttatgaggattaatgaggaagggcctgtaaggctcagcacccagggccacactgtggctggctggaagcaggcaggctggaggtctgtgagcttatcagccacacacaggtggaggcagccgaagctgagggggaaattagcacatctaggggtgagggtgagggtgaggggggcagagagtgaggatgggtgtgtgggagggtgtgagggaagagggaggaagcacagagcctggtgagagaggtggggaggtcagggattaggagttggggactcgtgggtttttctgccaagcccaccaccatgtgctgaaatgcccaggtgggtctagattgtgggatcagttgaatgaaagacttcttttccctgctgcagctactcagctgctcatttattcattcatacccattcactcactcattcacacccagggccagggagctccatctggtggggagccgtggatacatggccacagctcagggtcgtaactgcaactagagatgtgtcccagggcagtttgggagctgggggcactgatccaggaggggtagggaggggtccaggaaaacttcctgttggccaggaagatgaagagggtggggaggcaaaggtgtttccgggcaagggcccaaattacagcatgggtgcccagaggtaatgaaggggggttggaggtggagggcacaatggagagtgggcctgctgcccaactcatatggctggggaggctgctgtctgaacctgggtggccctggagaccttgtcaggaagaggagactttactctggagcaggagggagtcacagatggccctaaaccagagaggggcatatactatctttaaagtgacccccccgccaagctgcagcatggaggggaggttggagggagctggccagggcagggctgttgcaggagttcaggagggaggccctgtgcaagcttagtgctggaaaggggcatgaaacaggccaagttgattcaggaactgactagggggaaggtgctgagtctgcaggtggttctgcctgcctgctggttgaggaatattcctgtttgagtcagtgctcactgttttaaagtcttaatttgaaaaacatccttgaggtcaagctgaactgaaactggcctcccaggggtcctgggacagtactgtagaacacagtatccacaccctgtactgtccacgaaccctcccgctgggaccccttcccacatccccgagcccccacccccggttctttcaagcactctgccaacatcccagacctcacttctgccccaggacctttccctcgactgggtcaatcttccagggaacagccaggccgcctctgcctccccagggcccggtttttcgtgtggcaggccagagggcagccagccacacagagcacacccccaaggaacagccaaccctctgcgacagccgcactttatttggagttttccacctaagcagctcccagctgagctgcatgacatgtgcaaaagtcccctagaaagctgggcctcgcagtgtgtaaaaaaggccccccatggggcagagccgtgcaaccattttaaaaaaagagacagtgagagagaaatcaggccccctgggagcctggcttgggtggagtgcacatcgctcaggccggtccatgtgccaggccactcctgctggttcgggggctgttttcttctctgattgtgctttcctttccaagtccttaaaactctggggttgtagccaccagagagaccagaccaagtcctcggggtcaggagggtatctggccggcggtgcagtttgagggtgacctcacacacagacacccacaacacaatgctcccccactgctcagccccgccagaaactcagggcttccctggcctcgcagccctcgccagccccttgtgtcccagcctctgcccctgagcctggccccagtcggccctcatgtcacattcccagggagggacactgtcctgacacagacaaggtcctccaacccctggggcgcggtggggtggggaggctgggccttcacttcacccccaaggcaggtgtttgtagtgtctgattctgtgcgtgtctgggtgtggcacatttgtgtgtgtgtgtgtgtgtgtgtaatgtgtgtgtggctggaggtgggggctgaggctggggaggcacttttgggattcaagggaccttgactttgaaggggcttccagggacactttcgtcaccccacttgacaatgaggatgtagtcccctttctccttgacagtgtaggtgacattgtacacccggttccccatgtgcttcacgtacacctcctcacagggggtcttggggccgtgcacgcccaccatcatcatgttggtgcctggagagggaggcagagggacaggctcacaccagggagtcccctactgtgacccacaccctgctccctgacggcttcttgctcacaccccgggagacgccctccccccgccacctgcctgctttgctgcagtccacggtgaaggagttcttctggcccacgaaggcctgggacagcccagggccccgagtcaccaccttgctggcatctgaggagaacttggggatggagctgtagctggagccccggcttgaggaggacttggtcacagtctccaccagaaccgtggatgtttcgtgaaggctgtggcctccggacagcctcggacctgaggggtgggtggagggggcacaaacctagtcagaagggcttcctgttcttccccaggcaggggaccctcggccagcactgccaccctgtgggactcactgcctgcatttgaggctccccctcaaattcctccaagggccactctaggagcacagcctcattcccagccagggccctgagctgccagctccaactggtgctccaccctagggctggggcctcagatgctgcgtccctcatccttgcaggctttgtctgggaactcaggctaactcacagggtaagagccactttacaaaggaacacccacccaactcatcctacagacagcctcaagaggggaagcttgctcaataccgactgtgtcttcttggagcggaggaatatgggaagccaggagggaagaaagtggtgctagagcctgaggagccagcgcaggccagagctgaaggagtgaggggccacgatggagaggaagaatggcatttttacgtgatcatgcccgactccacagaacgtgtactgtgtagagccaggcccacctctagccctggtaaactgaccatgatgtctgggggcagactatggcctagatgtgcgtggccaccggagccctccaggctgggctgggctgcaggctgggtggacctcccccaaactggcactcaccagtgaccttggccttgaaggggctgcccacgatgtgctgggggccaccgtacttgatggcaatgaggtagttgccaggggccatgggagtataagtgaccacatggccctcaggacactcccgacagtccagctgcaccttggaggggccatcaatggtgacagacaaggcccccgagccggcattcagggtgttcacgatgaactctgatgacacacctgggggccagaggtagcaaggctgagggcaggaagggcttgtggcccaagagggactgggccccagctccctggacagcctctgtggggactcctggcttaggaagcagggcccctacctctggagcaaagcagcaccagactagtggccaagcacccccagaagtcaccctgttccccagctccaggcactcaccggtagtgcctccctcgagcccaggaccgtaggctgacaccaagcctgggtccccagcctggctctgctccccaacgcggatcttgaagggacttccagggatgtgggcaccgttgaacttgacatcgatggagtggacgccattctcgtgggggatgaagcggatggtgtgcttgtctgtggataaagggttggtggcttagcctccatccttcccctccccagaaggccccagcccggaagggagttggcaggggcagggccagctcaccactgtccagctcagagacgtagcactcctccacagcccccgagggtgtgtgcacccgggcatcaatcacgccccgggcaccgttcagctgcacggcaaaggacgctggctggttcaccttgagccccgtctcctgcaaaggccacggaggatgctcagactcctgggaggccggggctggagcagtcttctctgaagc

SEQ ID NO: 94614 - DNA, 22229 bp, Homo sapiens
gcgggatgactgcttgagtccaggagtttgagaccagtctgggcaacatagcaaaacctcgtctctataaaaaatacaaaaattagctgggtgtggtggcacatcctgtagtcccagctactcgggaggctgaggtcagaggattgcttgagcctcgggaggttgaaagttcagggctttagtgagccatgattgtgctactttcactccagcctgggcaacagagtgagaacctgtctcaaaaaaaaaaaaaaaaaaaaaaaaaaaaaaagctcaggatggtttctgggtgtttggcctgaccaactagaagaccaaattgccactcatttagatgagaaaggttgcaggaggcgcaatttggacaggaagatcatgagttcattttctgagcacgttaagtttgacatggacttctatatcacatcagacaaccacatgaagatactgagtaggcactaggttatgcaagcaagtctggagatagaaatgggatagtcttagagtcatgatcaccaacggggcatttttttttttttttttttgagatggagtctcgcacttgttgcccaggctggagggcaatggcatgatctcggctcattgcaacctccgcctcccaggtttaagcaattctcctgcctcagcctcgcaagtagctgggattacaggcgcctgccaccacgcccggctaattttgtatttttagtagagatggggtttcaccatgttggtcaggctagtctcaaactcctgacctcaggtgatccacccaccttagcctcccaaagtgctcggattacaggcgtaagccaccgcgtccggcttcaacaggacatttaaaggcatgaggtgatgggctgctcaggagtgaggtagacaagaaaaggaggggatcaaaggactgcccctgagccctggggcactcacattttcagttgtgaagatgaaaaagaaccaacaagagagcatggaaaaggagttcctgccggtaagcagaaaccagaagtgtggtcccctggaaaccaaaggaattgttccaaggaggagggagtgtcagcatcaaatgcaaagttatcaaaggtaggctgataactgactcctgcgtttaacaacctggagttggaaatgaagctcacgaccttaactagaacaattggattgaaggaaagaataggaggagaggaactagacactgaatattaactcttttgagttttgttttaaagtggagcatagaaatggagtgatagctggagggagatgtaggatcaagagtttttttctgaaataagagaaatcatagcatatttatatgcattttatattccatatattactatatatggaatgatccaaagaaaaggaaaaactgagaatgcaggagagatgggggtgggtgttgctggaacaatgtctttgagtaggcagaaagatttggggtcttgtgacaagtggggggcttgaccttagctagcacaatgtgttcatccatggtaacaggagagaaggcactgcacacagatgcagatgcagtcacataagtagatgttgtgataaaaatatatggacattttctgagaaaacagaagcaatcattagagataagaaacagcccaggtgcggtggctcacatttgtaatcccagcaccttgggaggccaaggcaggtggatcacctgaggtcaggagtttgtgaccagcctggccaacatggtgaaaccccatctctactaaaaatacaaaaattagccaggcatggtggtgcgtgcctgtaatcccagctacttggaaggctgagacaggagaatcacttgaacctgggaagcagaggttgcagtgaaccaaggtcgcactactgcagtccagcctgggcaacagagtgagactccatctcaaaaaataaaataaaataaaataaaataaagagataggaaacaaagtcatcaggtgagggtgaagatggcagaagaggcatgtggaggtttgaggaataagaaggtaagaaacagttgttcaggagagtggcagaaaaagtggacgagagaatgtaccaggctagctgggaagcacttaggacccacctaaggccaatggtaacaaagttaaaattagcccagttagcacagttgtgtatgtactgggagggtctaagttagcctaggagtgggagtgccaaggaggccttcccttcgaagtgatgtttgagctgaggaaggagggatgcatatgcattaagcagatggtaaaaagtttcagacagaaagtaagcctgagtgaagtccccaaggaagggaacatcagagtaggtttgaggaactgatggacaggcaataggcagcccaagaaaaacaagagagaaagaggcacagaaagagggaggcaggaccttgggggccatgccataggtgttggttctatcctgaaagcaacaagaggccactgaaagatttggggtgggaatacatgattacagttttattttgaaaagatcactctgaccactaggtggaagggcagaggtctaggtgaggacaaggagtcaaagcaggaagacaagtgtggctgttgtagtagtccaggcaagtgatcgtggtggtttggactggggagctgtcaatggagatggaaaaacatgagaagatttaagaaatttttaggagataaactgaataatggacatgtaggtgagaaagagggtcgtgtcaaaggtgatgtctaggtttcccactgggtgcacagtgatttgattcactgagatagggaagtctgagggagaaatgtgtttggtggaggaaggtcacaagatctagttgggtatgtcacacttccccagaagaagcttgaaggcccttgcgaaaatccaggcaagagatgccagtggcctgaactagagatgctgaaaagataatacttccccagacaactggaagttgtggccagatcacttgaggccaggagttcacgaccagcctggccaacatggcaaaactctgtctctactaaaaacacaaaaattagtgaggcatagtggcagacatctgtaatcccagctactcgggaggctgaggcaggagaatcggttgaacccaggaggcggatgttgcggtgagccgagatcatgccactgcattgcagcttgggtgacagagtgagactctgtctcaaaaaggaaaaaaaaaaaaaaaagaacatttaactcataggactgggtgattgctggaatgtgaggggagaaagtgagggacaagatgacatccagctttctgacttgacagctaaataggaggcaaagaaggagaagccagtctgggagcaagtgaagctaggtgttcccatccataccgcatgccttttctcccctttttagcataactgcctgcatccacccatgcttcatgcaaaaactgctgttggcaccctccactgtttctttttttttttttttttttttttttttgagatggcgtttcactcttgttgctcaggctggagtgcaacggtgcaatcttggctcactgcaacctccgcctcccgggttcaagcaattctcctttctcagccccccaagtagctgggattacaggcatgcaccaccacacccggctaatgttgtatttttagtagagatggggtttctccatgttggtcaggctggtctcaaactcctgacctcaggtaatccgcctgcctcggcctcccaaagtgccgggattataggcatgagccaccgagcccggccggcaccctccagtgtttctgagcctgctgtgttcacactgttcacctcctcctcacctgacagagcttcccttgatggattcccagggagtcatggtagacatggatagagcatgtccacaggctccacgcatacctcgccagagttcttgttctatgacatcgtcctctgtctccctcactagaccataagctccttggggagagaaaatctgtcttatttattgttgaatccccaatacctagcatgattcttggtacataggggacttgaaatacattttggttgaatgaatagaagaatgaatgcctgcctctgggaagatttccctttttttatttttgagacagagtttcactcttgttgcccaggctggagtgcaatggtgcgatctcagttcactgcaaccttcacctcccgggttcaagcgattctcctgtctcagcctcccaagtagctgagattacaggcataagccatcatgctcggctaattttgtatttttagtagagatggggtttcaccatgttggtcaggctggtctcaaactcctgacctcaggtgatccacccaccttggcctcccaaagggctgggattacaggtgtgagccactgcgcccggctaggcttcccttaatatgacctagttctgtccctatgaacaaagacatgttaatttacattcctagggagatgacattgtaagaatttttaaacgagtgctttcagtttgaggttttttctgcccattagattataatttgtgaaactgtttcctctgtagtttttgcttcttgacaaaagagaagcaaatttttccttaccttttccttttccaagtctgcagtgtctaattcctaccccgcttcctacaaaacacatcctaacccttggaaactcataagcttgtttctcttagcaataaaaacctaaggaatctgaaatatattcataataaagttataaagcactcacgaagtttaatgtctgcaagtctccctacagagtacccccatatgtgcatcttgacagaagaccatgtccaaagccaaggcgcttttaagtgacagtattctccataaaatcacaaagagtaacacaaggctgggtgtcgtggctcacgcctgtaatcccaggcgcctcgcgaggcagatggatcacctgaggtcaggagttcgagaccagcctggccaacatggtgaaacgtcttctactaaaaatacaaaaagtagccgggtatggtagcgcaagcctgtaattccagctacttcggaggctgaggcatgagaattgcttgaacccgggaggcagcggttgcagttagtggggatagcagccactgcactccagcctgggcgacacagtgagactccgtctcaaaaaaacaaaaaaaattaaaaacaaaaaaaaagcaacacgatagaaacaactccttcttataggcctgcctgagttttatttcctgccctccccaatcacccaccctaggtgctttgacaggcaattcgcgctgtctggcacgcagaagcagacgccaaaataaaaacaaaaacaaattttaaaaaaaaatttgttaaaaagaaggggttagactgggcccaaagttctcccctctcccccaaagatccacgaagtgaccatttctccgcgcccctgggtccccactctctcccgtaaaaagccagctcacgcaccctgcagcgctgccaagatccccacgatgcctgtccccgcacccagttcgatcaccttcttgcctcggaaatccacattttgactctcgaaataattgcacaggctcagggcctacgggagaaaagacagagaaaaagacagtcgtgaggatggctccatatgggagaggcggagtccgggatctggacctcccacggaccctcacccggcgcagcccattcctcaccgcgtcccacacgcgcgccgccaccccgaggcgggacccaaagttctgcgtgatggtcagcacatgcccacagaaacagaactggctcttctccragtaagagtctgcaaagagcccgacctcccgcgggaacaccgattccgactcagattcgggatctgggccggggtccgccatccggcccgccaagggagtgcctgggcaccgcggccggcgctcagatcccggatccggagcggggtagaggctgggggccgcgagccgtcgtggtgtccctgtggmacgagccccgcctcsctgagtttgccctccttcctccagttcgatttcctggaggtggaatgaggagctgcccctcccgccccggccccgagcgcacactcgacgaaacccacacgggaccacaagagtcagaccgggcggactggtccgagaccaggagtaaggggacaggagcgaggactgatgccactgtagaaggcgaggtctctagacccctctcacctgtggggtgcacaggtgcctgcaaccaggatggtaacccagaccaggcagaagcaagctaagagaaaacgttgggtccckgggcctggcctcgccctcccagttggaggctaacggtgcggaggttccctccagcactcgctccttacagccctccccacctagcccagcccagcccagcccagcccagctgaatttgctcttgggtctttaaggggcgggaactgccaccaacgcgcatggctgcgtcattaacttgcgcctctggcytgcgcctccacgtggatttggtagagaaaccccggactgggatcatggcagccgagactcggaacgtggccggagcagaggccccaccgccccagaagcgctactaccggcaacgtgctcactccaaccccatggcggaccacacgctgcgctagtgaggagtgggcagagggagagagaggagggcgggattctcaaagcagccgggagagcagttgtgctgcaactgctgggaggatttggggtagacccgggaggatcagatgggtgacgtcagtttttgggggtgggaccgggagattcgaccgagagaggagttggcgggttgagagtgggcgtggcgttcgggcctaagtctgggtagcggtgctaagtttgggaagagaaataaattgttactgagactgaagtgatagaggcagaatgtcgtttccatcttttgcttttgtttgttggatttaataaaaaggcaaacatatacacaatcctgcccgcaccttaccttaccttccctccccgcagagcacaaacacaaagtaggatcccagtgcattaggcagccagtctcgggagaaggggaacttgtgccccagaaagggcagttacccggccagggtcacatcaaccgccagaagtggagttgggcaggtcagcgtttatgggcctcatgatggtcctatgattcacactgggagttaagggtggtttccattgtccctcttagaggccacagggcccagtgttacagaatttttgagaaaccctcctcccttttacctcccaccctcacccacccacacactctcacagtaccacttctgcaatrgtgtgaccaaccttctcatgcttcttatgtcttctttccaatagccctgtgaagccagaggagatggactggtctgagctatacccagagttcttcgctccactcactcaaaatcagagccacgatgacccaaaggataagaaagaaaagagagctcaggcccaagtggagtttgcagacataggctgtggctatggtggcctgttaggtaacactcaggccctctttttggggtgagaagaggcctagtagcttctgctgcctcagcaacttttgtggggggtcataattggcctttcccctttcgtccagacactggtgacatcagcatggagaggctccacctaccctctactctgggtctgtgacctttgccctggagagtggagggggctgcctcaaatgcttcttaaaacctgggttgtcctttctggcgtcaatccctacatgagccatttcatctgccaggttcyrggtcagtgagctggtcagcacaagcatcagagattagcygttgtggccagtgatcctgaactgtcttttctcagagattctaccatctcccctcccctttgcccctccctcgccagatctcattccttctgccccactctcctgttttttgggttyctcttgtattgtctgtattgtcccacccatgcatgccaagccactccctatttttagatcttcccaaacagataacagcctgatagagaagaagagcatggtacatagaggcagaaaaccttggtttaaggtccagttctgcctgggcacagtggctcacacctgtaatcccaacactttgggaggctgaggcaggtggaccacttgaggccaggagttcaagaccagctactcaggaggctgaggcaggagaattacttgaacctgggaggcagagattgcagtgagccaagattgtgccactgcactccagcctgggtgacagagcaagactccatctcaaataaataagttccagttctgccccttcttaactctatgatcttcggcatatctgaccctcagtttccttatcttcacaatttaccacagagtgttataaggatgaaataacacaatgtgtgaaaacactgtggaaaactctaaagcaatggcaaatatacatgtatcctcagccctcccattctggtcctggtgacaattttcatttctccccccgcctcttgagcataaaactatccatatatgtatctctgtcctctcttgccgttctggactttggtagttgcaggttgaggcttcctttcctgtgttgacccctttgcacttcctacaagtatatggttgatgattccattgctatttctgtgtgcagtggaactgtcaccgctgttcccagacacacttattctgggtctggagatccgggtgaaggtctcagactatgtacaagaccggattcgggccctacgcgcagctcctgcaggtggcttccagaacatygcctgtctccgtagcaatgccatgaagcaccttcctaacttcttctacaagggccaggtggggaggggccctggtgggttaggctggtaggcaggtgggggcatggaggccaggctctcacaaccctgttggtgtgtgtctgtctcacagctgacaaagatgttcttcctcttccccgacccacatttcaagcggacaaagcacaagtggcgaatcatcagtcccaccctgctagcagaatatgcctacgtgctaagagttggggtgagttgggatcggagggatgatggggtgagtggcctactcaggggcccttcactaagaattcagtgggggtgcatttaggractcacaccaccacttccttcatctggctgctgacgttgcatgcagcctcctgtctagggtgattttgcctatgcaggggctggtgtataccataaccgatgtgctggagctacacgactggatgtgcactcatttcgaagagcacccactgtttgagcgtgtgcctctggaggacctggtgagtaggggacctagaggaggtggaggccctttccagagtggttctgtatttggacttaactcagtgccaggaggatgggataggtgtctaagggccaggggcagtctgaacagtgggcaaggacttattggacccttccttctcccagagtgaagaccccgttgtgggacatctaggcacctcaactgaggaggggaagaaagttctacgtaatggagggaagaatttcccagccatcttccgaagaatacaagatcccgtcctccaggcagtgacctcccaaaccagcctgcctggtcactgactgcttactctaccttagctggacctcgtctcccagggaytagagaaaagagcaggagtcctgggtcttcccagttgagactgctggagctgagacacagtactctcttaaagaaggtggggagctgcccagggcagaacccactggtgttcatgactacccctggctcctctcaccttgtccctccactgccaacagaaaacaaagcagctgactgagatggtcaaaggactttggaccataggggatctttggaaggctgtggggtcttgctcttccttagcactcctttctccttgtgagatctctcctcagctggaatgaggaatgtagtccatctaaactgcttgctaggctcaattaccacttctgtttgctttgtggatcctgggataacatgtatatgtgtacacatgcctattctgccatttctcaggaaagggtggagtatgtatcatatgccttctaccatcctcctgtcctctccctgcgtaagacttgacctggggaatctgtgttccctaagtgttgtctctggagagtccttgggaaggtgtgggggtggagaccctctcctttttcacattgaccttcaattccagaacttcagagctagctgactggcacagagcctgatagagttgcagtggggaatgagggagtaaggagcagagaggtaaactgtgggagattmttttattttaattttttttagagacaggccctctctctgttgcctaggctggagtgcagtggtacaatcataactcactgcagccttgacctcccgggctcatgtaatccacctcagcctctcaaggcactacaggcatacgccaccatgcctggctaatttttgtattttttgtagagacagttcsactatgttgcccaggctggtctcagactcctgagctcaagcagtctgcccaccttagcctcccaaagtgttgggattacagtcatgagctgccgtgcccagcctaatttttaaacttcttctgtagagacagtcttgctatgttgctcaagcttgtctcaacctcctggcctcatgccatcctcctgcctcagcctcccaaagtgctgggattataggcatgagccaccacaggattytgaggctaaaagtagaaaggagctgctaaccagaaagccccccagaggagaccgagtcagctggggaattagaacatccacatccatttagctcctctaacaccccacagacaatctctgaacttaactaatgtacaaaaagtttcatttctgcttctcaagccccaaattcccatgtctggaaggagggggcttgtatacccaagagacccccttatcctcaagaaagaaagatggaggttctaggagccattttagcccattaacccacctgccatctgcccagtatatgttaggtacaggaggagggggaggtgtggctagtgcaggaaaataatgcagagaagatacaacccactaagccaagaatgtggggacagttacagctgtgcctcccctgcttcccttcctggaggagctgaaagatggggaattcctgaggatgggcctaaaggggctgggctcactggtagaagtgggaatatcagagactgactagtgtagcttggtcacctagtccctactaaaaagccttatagcctttcctaggatgagactttgaggctcctagacaaaggcactctcccaggaggaaaatcttaggccctccctcccatgagggtcattgcaacatgagacccaagggagttgtgaagtcagccccagccccgcctactgttcctgggtgctaatccccagcacagaccactcaggaggagggattggctgaggagcttggagagggggcgtcatcacctcacccaaaggttaaataggggttgagatatgatgctcaggagaagcgctttctttcgcgagcaccctgaaccagaccatgacccagaccctcaagtacgcctccagagtgttccatcgcgtccgctgggcgcccgagttgggcgcctccctaggctaccgagagtaccactcagcacgccggagcttggcagacatcccaggcccctctacgcccagctttctggccgaacttttctgcaagggggggctgtcgaggctacacgagctgcaggtaggaagggacgcctttcccgagacagagtgctggggaaactggttttgacagcgtcagaaaggactgactagtgcagascaaatgtgggacagccagagagaacggatgcccatgaaataaggaaaaggcgagttgaggctgggggcggtgtggctacactcgggcagagcccgtcccgactcttakcagagggcgctgcgaaagcgccttctcgctgtcctgaggtgtggagatcctgcagataaagtacaastgcgcgggagggggaggccggagtgggcagtaccctccgcctgcttgcggcttaaagctacatgggttccttttcattcactgaggactcgtcctgagatggacagtccagacatggaacttttagagatttctcctcgaccgagatgatcagagaggtcctgaatgtctgccttgcacaaagttccggttttgcccatcacactcaaactttctagggatgggaaatgagagaggaggagtttgcagtatcaaaggcatacactagttgggcacccgagaaagagcagaagctccctattcccaagcccagtcaacgcccttggcgtgggcacaggtcaagctgaaagtccccgcccaggtatccaagtgtccgctgtgtccgctcccccaggtgcagggcgccgcgcacttcgggccggtgtggctagccagctttgggacagtgcgcaccgtgtacgtggctgcccctgcactcgtcgaggagctgctgcgacaggagggaccccggcccgagcrctgcagcttctcgccctggacggagcaccgccgctgccgccagcgggcttgcgractgctcactrcgtgagtcttctctgcccccagaagcccagacgccctgcascggccctctcctgctgcgggtcccgaaactatcaatctgggggcatggtgggaggtcggctgtcccactctaccattgggcatcttggggttcccatcccagtctgcttcacccacactcaggttgagccccaacctcactccccgcctacctccttatcctttgaggcccgaatcctgggaactgggggaaccggaggaattgggctagggtacaaggatctggatggaatgaatgtaaggttctgtgactcaagttacccgggaaccccggcccctgagggcaggaaatgagtaaagaggaagggrgctggaagacaggcgcaggccggtgcaggtttccgtaccccaagggggcagacgcaatccctctcctggccaccgcagccgaacgcgctccttcactgcagccagtcccgtcgagccgtccccaccttcccgatgcgcactctctcctcaaccctgcagggaaggcgaagaatggcaaaggctccgcagtctcctggcccygctcctcctccggcctcaagcggccgcccgctacgccggaaccctgaacaacgtagtctgcraccttgtgcggcgtctgaggcgccagcggggacgtggcacggggccgcccgccctggttcgggacgtggcgggggrattttacaagttcggactggaaggtgagtcccaggacagagctgggcaggcgtcgggggcgccctaccagagcctcccggaaccctgacggcgccccctcccgacraggcatcgccgcggttctgctcggctcgcgcttgggctgcctggaggctcaagtgccacccgacacggagaccttcatccgcgctgtgggctcggtgtttgtrtccacgctgttgaccatggcgatgccccactggctgcgccaccttgtgcctgggccctggggccgcctctgccgagactgggaccagatgtttgcatttggtaaggcacaggtcgaggtggaaatgggggaatgtaaagctgtccagggrtagcgaggtattcacgtgccttctacccacgcagctcagaggcacgtggagcggcgagaggcagaggcagccatgaggaacggaggacagcccgagaaggacctggagtctggggcgcacctgacccacttcctgttccgggaagagttgcctgcccagtccatcctgggaaatgtgacagagttrctattggcgggagtggacasggtgaggttctccctccgtgctgtgagccggttccagggcttagcctccgcagactccggctccatttttctgttgcaggggatccattatggccacgtagaccagcttggcttagcaccctgtagccccagactcttccataatctgcaccctctgctgggttctcacacccaacacctctcttgctttcacatgtttttcaggtgtmcaacacgctctcttgggctctgtatgagctctcccsgcaccccgaagtccagacagcaytccactcagagatcacagctgccctgagccctggctccagtgcctacccctcagccactgttctgtcccagctgcccctgctgaaggcggtggtcaaggaagtgctaaggtgagggggaaggagaggaggaacaagaggaaatgccaaggaagggctggggaagcaactagtggatggaagcagggagatagcagagaaaaatggccctctactcctggccaaaaagggtttggaagttggaaacaatgagaagggggctgcagcccctagcctcatcttgytgtctccattttgtgctttgcaacctagactgtacyctgtggtacctggaaattctcgtgtcccagacaaagacattcatgtgggtgactatattatccccaaaaatgtgagtaaagcctatgcaccctttctactgagccattcctcactatcttgggccccaaccctgttctcaaacactctcctaaaagcccttcaaacactccccttgacccctctctaggatatgcctttctaggatgtaatggaacagtggggagatccttccaaaagtagccccagaaaacttccccatcacccaccaggacctgcctttgtccctgtctgaatatcctcttcttcatgcctgccctattctgagcccaaactgacaagtttgttttcctttgcaccagacgctggtcaytctgtgtcactatgccacttcaagggaccctgcccagttcccagagccaaattcttttcstccagctcgctggctgggggagggtcccaccccccacccatttgcatctcttccctttggctttggcaagygcagctgtatggggagacgcctggcagagcttgaattgcaaatggctttggcccaggtgagtgctctagattttataccttccccagactggagagaccctaaccctctaaagttgtgagctctttcccctgacaagcataggaaatcatataagacctggtagaatgmatcttctgaaatatgataagcccattataggcctggagtgtaagtgagggtattcaaactattttttccctaccataatccctcacccttattaaccaagaagtcccctactggccacaggtgccacccaatcattgaccattctaayactaataatgcatgccctttaccaattggattaccaatgaatccccccattatagatatctttcatagtaatgctcaccttcttccctttccagatcctaacacattttgaggkgcagcctgagccaggtgcggccccagttagacccaagacccggactgtcctggtacstgaaaggagcatcaacctacagtttttggacagatagtcccatggaaagagactgtcatcatcaccctttcattcatcatagggataagattttttgtaggcacaagaccaaggtatacatcttcccctaatgcctatctgaccaaactggatagaaccaccatagtgaagtgtgaggcggccctgaccaatgtgtgaagtatgcacttggcctgactcaggaagccaggtgagaaaaccatggtctctctgcttgcttggcccttctgatcatgtatgcatcccccaaggatgaaatcagattttaactaataatgctggatggcctgaggaaagattcaactgcctctctttttgggctttcatagtgttcattgatgctgctggctaagcatttatcaaagcataagctcagtaactgtgcatctggtctgtacctggttggtccttcrtctttgcatgtaagctctttgagaggaagggtgaagccttatttgttttttatgtcccctgccagggcctgtctctgactaggtgtcaccatacacattcttagattgaatctgaaccatgtggcagaagggataagcagcttacttagtaggctctgtctacccccttccttctttgtcttgcccctaggaaggtgaatctgccctagcctggtttacggtttcttataactctcctttgctctctggccactattaagtgggtttgccccatcacttagttctcaggcagagacatctttgggcctgtccctgcccaggcctctggctttttatattgaaaatttttaaatattcacaaattttagaataaatcaaatattccattcttgattttgacttatttctctcatattcccacttcctacaagacctggaggcaagactctaaccctcccatctcccaccttggtttctcaggtcctgggggtgacccccataacaatgggaggtctggacgcctggaagagtagtttgtaacacaaacccagacatgtttctgtctgtagtgggaacatccaagtctagtctggcttcctgtaagagattaagggggtggggggtgaaaagtaacggcaggggctaagctgtaaaatgggcccggagctagggatttgcagacatgggcagaggttgctgactctggtaaggaaagtgcttttggactgccaggattgaaggaagtcctagattggtcactttgccctctctggaaaagttgttccaagataatttccttcagaggaagggatacaagcagagaagtggaatcagacagacagaatgaaagctgagtgtgggggtggccagaagccctggggcactgaggcaggataagggcggtgggcagagggagactgtttccctaagtcagcattctctggccccccagaggctgggcacagctctcctcttgtgatgtatacagattaactcatcttccatccaaataaatctctcagcacactgcacagttccttctgcatcccagattacccttcccatgtcaggacttgccccccttcccctaccgctcaccctattccaattagctgggtgtagatggagatttcacttcacacttcttcctcctccacaccttggcctcctggcctagacatggctccctgaccgcagaaactccagtagccaccaggccttttgcaggggcatctaattatgcaagatctacagaggggcagggcagacccaaagcctcgtacaaagatcaaggtttctgtgcattttctgcccttctcaactccttccctactgtatactcagtctccacccctattcctctatcactgaactcaatttgaacctaaatgaccaaattttcagcagatttgatctttgagggagaataaagcccagcttgtcagaccctttaccctggaatcagtgatgagaattctgcccatccgtactccctattttccactgggcaagtaggaatgcccacttgaagagggcagcagttcccatgaccctttcctggacaatgatctttttaagttggaaaaaggaagaagaggagaccatactgattgctggccccaactcccataccaagacttccattagtgctgaaggagaggggaaagtgtcccacttggcctcattttaggacccagagtgtaaatggatacagtgtgtttgtgtgtgagtatgtctattttctttggtatgtctaaccttccctgcagagccatcacagaggacagctcaggcttggcacaggaagctccacatgtgtcctatctacctgagccctatctgctggtatagatattagtagtcactctgatttgcaatcccccatttggtccccaccagctcttctgagaatggcaaatcagtaaagtctggcctttctgtctcccaagatgggggatatagagggttctctctctggggaaacagtttcctactgagcagacggagggttcagtctcagttccctatccactctactccctcaaaaattggaagttatatacttccacactttgaaattacttgaaccgcagtccagcttttgttcctacatcccaaggctggtctggatgccagcaccatggacagcaaccaagaccccctttgggagaggggaggggacaaggtttcctgggcaaggatgtgtgtgggcctttgcaagggaagcattttctccaaaacatccccagggaggaaggaggcaaagcagaaccttccctgatagaaggatcaataataagaaaggcctccagatctgactttagccgtgaatgaaggaattatttaattgctgttgaatggtttacttaaaaacagcatcattcatataatacacaaccccaaggtcacagaagaaagtgcccaggcttcaggctgacccacattgtaaacagtccttcccaaatcttttctctataaacaacagtcctctatgctgctgcctccaaacataatgccatccattaataccactggctgggcacaccgggatcaaacctgtgaccctaaactgccatggaaatagcttaaactggggttggagactcataacactgagtggggggattccctccatctcactccaaatgagtccaaattcacttcacactgcttttctgggtgagcacagtacttgagaaggactgatagaacccagatgatctccagaacaaggcagatggctccagccttccccagcccacaggcccaaatatttagagtcagaggagttctcattcttaacaaataaccaccatgcttcacatttgcaatgtctatttcccctcatatttccatacctattatgtcactcaacacaaaattccatgattctgtgcaactccagatgaaaaacacattttagaatttgttacaccagctactatttgaaataaatggaccatcaactattctagaaatctctttatgtcattgctgattttctctgcaacggcatccaacctgtccctcatttatccttattccaaccctatgaagtagacaggaaaaccagagctaagagatttttttctatatcacacaactcataggtggcaggtccaggtctaccctttagatacctcggagtgctgccacctagcagccaacatgaattattcaccagcaagtgggagtcacacctacaactcagaacccactgctgcatttgggatttgcaacctgtgcagagaaacctccccacatctcccaaccctccagaaaagccccagatgagaaaggagtctccacgtgcatataaatgattctttatgcccttcccccatgcaatgggggatggagcagggggaactccccgccctcatgcagggaacgggaggtcaatgtatactagtcttattgccagatgccctgtggccatggggtggggaayaggggtctacagcccctttcttctggcattggtcccccttcaccaagtcaccgtggtggagctggggggctggaggccctaggagctgaggtaaagacggttctctccagrgaaggaaagctgctctccccgcctgcccaccggccgtctctggatgagtgggaggagctgccagcgggtactgaaatgtcatccaggtgtctctacccagtgggcagtgaggccagacaatgtctccagcttgaggctacccacacagatcctcggtgacgggggcagcatgccccaaacaccttgtccagctggtacctccagcagccatgagagttcttctctgactgatgcattgactcaagatccctgctcctggagtccagttcagactgtagtgaccctcatgacaacctctcggccagaatgggagctggaacgggcatctggtggccgcagctgcccaaggaggtgcaagattgtataaccgcagcgctgaggcaagagcgtccgcatgcgctgggcagctggggggcggctcgtggccccagaggtggggcccgtccgtgagttcctggggcctgacttccctgccgtccctccccctgcatctcctcctatgtccttggtcttgtcataatttaggaccttccactgctggttcactgcctgccagcgcttgaagatgcggtagacagaggagccttcatggatgatgaggcctgagcaataggaataagaaatccagggttaactgtggcctagatctaggccagaggtacttaagcaagcatttcttcagagtgagaagatacagttgcaaagggccctggagaagcagggaagtgggttgagggggcaccaggatagcactaaaggctacagtggcagaaaataaagccaggaaactgaggggatgggcaggggagttaggtgtgtaagaggaagatacagagcaggtaaaggagagagaggtgccctcacctatgcagacgacatccatgaagccatacatgccgtagcagatctgaaagagcagatcctgtcgttgccacttggctgaagggctgagtgaggaccagatgagccaggagatgctggcaaccaggaagagcgagcccagaactatggcagcaatctggaccttctcgatgaccgtcagggagatggcctgccactgtgtgggagaaagggctccaaagagtcccagaaagggatggagggccaggtgatgggtggccctgaagagcagggtgctccaggaaccttccctaaaaccttcaggcaggatcaacatctgtcttctctgtgccttgattaaatctagaatgtggcacttgtctgacaccatttgtcttactttagaaaggcaggattgggcaagtgctctgaaaccaaaacatctagatttgaatcctaaatcttgactccatcacttactggctaagtaaccttgggtaagttttcaaatctttgtgcatcagtgtcctcgtttgtaaaaggggataataatagtatctaataagattattgtgaagattaagagttaatacacaccaaaacttgacacagaaaacactacatatttgctatcatcatcaacatcattttttcttttcttttttttttttttccttcgagacggagtcttgctctgttgcccaggctggagtgcagtggctgtgatctcggctcactgcaacctctgcctcccgggttcaaggattctcccgcctcagcttcgcgagtagcttacaggcacgagccaccacgcctggctaatttttgtattcttagtagagacggggtttcaccatgttggccaggctggtctcaaactcttgacctcgtgatccgcccgcctcggcctcccaaagtgctgggattacaggcgtgagccaccgcgcccagcattttttttttcttttctttcttttttctttttttttgtggcgggtggggagtggtgattgtcccagtgcctagaacagtgcctggaatataagtggcacccaataaatatctctgtgaataaattaagggcttaggaaggatatacagacacacgggagactgtggtaactggcggggaagggtggctttgggaaaagagtaaatgaaataggcttcctggagggtccctgagtccaatagctaaaaggtcctcgcccaatctccgagtcctctccttgcacctcacctgcagtgggttcttggtgctgatcgccaggacctggtacttgaagtagcagagctcacagctccaggagcccctctcgctgatccagcggatgaggcagggctgatgcgtgcagcgcactgagccgtcgcagcggcaggggcttaagagctccccctggaggaagagtgaggaggggccctgtcagccatcaccaccccgaccccactcagccgcgctccccgacagggaaacctcctcttcaggtcactttcccaccttaaataactcaggcctttcacccaagacagggcaagaggctaagtaaggctgcaacagaaaagaagcttcccttggagatcaagggaaacttcccataccaaagagatgaaagatggaaagggatggggggattagaggggagaagggctgggtcttctcttttcctagaatttgggatgggtagtctttaagacttctcaaaagaaaggcttcctcttaggatctggagggaggggagtgttagagcttctgagccatgctttccttcccccaccccatcattgtaaagttacttcacagatctggcgcaaactgggatgggttatggtcctcggtttccacgtactaaaaaggggagaaatcgcggaggtgggagtgaagggtgtttccctttaatcatggaatcaattctcactacacagagacaccccctggcactattctgggacaactttgcccataaaattttaacaaagaatactctttag

SEQ ID NO: 94615 - DNA, 12288 bp, Homo sapiens
aacatgaggaaggcatgactagatgatctccgagaacactggacaagatgtcttgcagcattataatgttatgattactactgggagagccctaaagccatggagataggaaatttcatcttgtgctaaatgccacgacccaagcaggaatttgtactaattcacaccacagttagtttatgttttaaatgtgtaagttcaactaagtttctatgaaaaaaccatagaaagtaatgaccacaatgtttttctgctataaccaatccactggacatgagtcacaggcgttggtggaggttttgagtgatgaaaaatgaaccagaaaatggagctgaatcagagggtgggaaaaatataagaggcttccacgatggaagtgaggggatagtaagccttcctaaggactaatttaaatatctcaggaggggaagttggaaatgtcactagagccctgtctccatcaattgctgcaataatcaaatcctttggatgggagggaatacagagggcaccctcaaaagttagtggtcctaagtcctccaacttattttcatatctttggattcataaattcacagaggttgcagaggagaaaaacttcccttaagtaatcttaacagaaattctccaaagcccccttttacttctccttcaactcaaagtacccatccattcctcccaaataaccttatctacagaaactaatacatattgtcctttttgtctgaccttgaaccttcccttatctactcttggctaggagctttttggcaagaggcggatgaggaggagtttggcctcccttgtttaaatcctttgttcttctgtcacggaagtcaggcctgctccattcatcacaggtttgaccactcaacatttgacaccacaatgataaatagaaatgctaacaccattcaaactttccctacatgctagtcactgtactaagtgctttatatgtattgttacttttaatccacattatactcttgtgaagtggtagtgaagatccatgtccctgaaggtattcaagcccaaaaaccatctgttggtaacattattgccaggcgcattggctcacacctgtaatctcagcagttttgggaggctgaggagagtagatcacctgagctcaggagtttgagatcagcttatatagatggggaaactcccacctccctaagctaagaggcgttctatcacagtgtgtattttcatcacgagcacacatttttatttacctttcctcttatgaactgtggacttcttacaagatctcattagcaatgtgggctttctcatgtccctgtggctccgtggatgttcccaagcttactggttttggagtcttgcacaggtaagcatcctgataagagctataactgctcttctttttgcccattcatggtggggtgggggtagggggaggacattagaatgaagctctgaagtctttgaagcacttttggaagcccagttgtgcaggtgcatggaagaaatgtgatgaaatgagttgaagctctcccaaggagaagagaaggccccctggatgttgttgctactggtatgttttttggtgccatagctcaagggttatcccccagagccccagacactatgaagagggccaaagggtcctgatcttaagggcagggtgtaggcagaggaaatccctggagctgaggatccttctcttcacagtgattctgttggccctcttcatggtgtctagggctcatttacttcagtgtgtggagacttctgggaaccagagtcatgtagaaaagtctcctccccagtctacctcagatagtctcccttctaggagagccagctcatctagctccagttcttgggttactttctttactgaactccatttccgctcctttactccatgttgaaacaatttaagtccatctgcacaagactgggcaaagctcccctggacaccatcctcctctctccaagctcccagccctagaaacataaatatctcataattaagcattctccttttcccattcttcagctttcaagtaggaatgcatcacagttcagccagccttggtatttggcccaaattattatcttcttgtatctcagctttggcttttggaaggctgaatagtcaaattcctatttcatcactattcctggcatcctttaacttggctgtgatcaaggtcacacgaaggattgagtgacaaatctattcaggtagggcaccactaataagaataggccaggccatttggatttattgttaatatctgaatagttacttccaaatattggtgagtactctagatgtaacctggagtgaaattttccttgtgagcttaaaaaaaaattattatattgaaattctaccagccagtggaagtataaatgggtatttattattatttattatttttaagaaagatgctattattaattgttgtgaaagcttatatatgaaacaattatttaaaatttccacatggttaaaaaataggaaattagttgaccgataatataaataataggagagagtgtgttagctagataactttagggagaaccttatgtcccttgatcaacaatgatttgaactgtgcaagtccacttacattcaaattttcatctgcttctgccatccctgagacagcaagaccaacccctcctcttccttctcctcctcagcctccttaacgtgaagacaatgaggatgaagacttttatgatgagccacttccactaaacgaatagtaaatatttttttcttccttatgattttcttaatgacaccttttttttctctagcttactttattgtaggaatatggtacataatacatatagcatacaaaatatatgttaactgaacgtttatgttattggtaaggcttcaggtgatcaataggctattagtagttaagttttgggggagtcaaaggttatacttggattttcgactgtacactaggcacccttaacctccatgttgttcaaaagccaactgtactttctgagaccaaggtatgtatgtatgtatgtatgtatgtatgtatgtatgtatgtatgtatgtatgtatgtatttgttttgagacaggctctcattctgttactcaggctggagtgcagtggtgcccaggctggagtgttacccaggctggagtgcagatcatggctcactgcagcctcaaccttctgggctcaagagatccgccacctcagcctctggagtagcagggactacaggcatgtgtcatcatacccagctaattgtattttttgtagatatggggtttcactatgttgcccagactggtctcaaactcctgggctcaagtaagctgctctggttaggcctcccaaagtgctgggattacaagtgagagccactgtgcccggctgagcccaatgtatttacaacaatttaataaacaccacaagtagtatttaatttaacaaatagtacagaacagaacaatagaaattagattatatcataattctatctatgatttaattactctttttagaattgattggtgtattatgatttattatgtaaataaaataatcccttaagaagtatacatatttgaaagacttttttgaaaatgagatataacttacataaaatacacaaatctttttttcttatttatttttatgaccacctgctgccttttgaaacaaatcttaagtatacagttcaatgagctttcacataggaaacatatccagaccaagaatagaatatttccaggtcctcagaaggctcccccatgccccttcacagttatacttccccaaggctacaactattctgacctgtatcaccacaggttacttcagaactttctagttatttaatgctatttaggtcaacttttaatgctatattaggtcaagtttcaagaaaaagttttagttggaaattcttcttattttgggaggatgcattgaaggcataattttagccactttaaattttgtgaggagaatgtctctaaaaccatattatccataagaaagatcatcaataaagaagatagagttgtgaaaaaagaataaaatgaagagaaaaatcggctgccccaagtatcttgcttttctgtgcaccacaagtgaaaatcatctctttaggatggtaaatgtagtatactgaccacaagagttcaaaacaaattcagattttggataaacttcagatttattcaagaatcccagaagtccattcgatgatggcaatgttctgttttcaggtaacagttgtttttacactcagtcgtttggctgttgtgaccaactcatccacttattggccctcattctgttagaactgtttaatgatctgctctcctttcctttaatcatcctttccttactttctctcctcatcatctcagacaacctggctgccctcccaggactctgcctgcgggcttgtcctctaacccactcatgatcatcactctggcagaaggaagtctctcgggagaccttagtgggggtatttgccttggtctgcgtgttttccaaagatggatattgctactactagttatgatctaacacctgtcagtacttggggctgacaagcgtttcatagatagcatttccacatctttacctggaatcctatttggcaggtaggattcctcacattttgctgtagagaaacagacaagccaattgttcgaggtcatgtagacgggagtcaggatttacacctgattctgtctggctccaaagcttactctgactctggtcagtagtaaaaaagcacaggagttgatggggagggataggtagagtggaatcctcagcagggttgggaatgtcttataatgaatttgggtttgaaatagaacaggcatgggacacaatgcagcttgtttgggactgagataaaggaagaaagaaggggatggtgctggtcaagcaatgttggagagaccatcaggactggccaataccaagccataccttctccagctccagtccccagaacgagagaaatggtatctgtagcccagggggacagggaaatggcattttcgcatctcaacccctcaggcctgggcagactgccagagtggagagccagggtagcaatgaggcaggggagatcattatcaggaggaaggaagctctggcagctcccaccagcctgtttgtgacaagcaggctcagggccacggaagtcccttaaggtcaaaggaaatgtgatcctggatctgggggatgaagctcagacactccctttaccttatgtcttcaggccaaggggatctggccagagccaggtccagggcctaggttggaagagcagtggtctagagaaacgggaggggcagttagagaggaagagagagaaggaataaaatgccagagcacctcataaacaatctcttggctagagaggtaatgacctttattgcagccaacacagggtaactggctcttcagagcactcgtttcttcatgagtgaactcttacctagttcaccgcttgcctctgtaacagtgacttctttcttgcgcaactggtagagtagaaggtacactgtatttagagcaaggagacctaggttcaagtccaggttctgctactaactaattagacaagctctttaattcattaagctttctaaaaccttaatttcctcatccataaagaaggcatacaatccctgtcaagtctatgtcacaagggattagaggattctatacaaatatgaagtggtatttatttatatttttctttccttcaggtcacctcactgccacgtcagagctggggaagacttctagttcaggaacagaaacagctgtgtccacaaatcccatatgccccctttccatttatttcctctccttgtcatgctgccctaatgccagggggcaggggagacatgtgcaatggcatagaccagggaacccacagacctgagcttgctgtttcttggggataagcatctgggaaaacagcaacaaaaagatgaaaagccatccytctagagctcagctcaccagagtgtcagcttcagcctcccagcagaggctgaaccaggaacagccccaagagatgaggggaagagaatgctctgggtgtaggggagtggtgcggagtcctggagagggaattgaaggtcagccaaagagcaagccagtctggaaacctaaaggactctgtccaagtgtacaggaaccaggtggaattgctgagagtcckttttctggggaggcttacaggccactacgtaagacttgttctgtcgcttctctttgtacctgcagttcggatacttccctgaggtgagcttacacatggtcagggacacgggcccgtggctctggtggcagtttttatcgccattcttgcaggctattttgggggtctggcaggtggcggccacactggagaaaggctcgtgcaggaaggtgttgaggtctttgcaccgttttgtgtgcttgttaatgtttttcatggctgagttgcatgcttgagggctgggctgcatgtgctgaattttaaaccactgtgatgaggtcatgcccttgggcttggcactgactgggatctctgccacccacagccccagcagcagaagcagcagaagggggcagaatcctgctctggccggtgccatctctcttaggaggagcagtcaggatggagggcaggggtcgctgggacagaggtgttcagttgagaaattagtcctcttatacctgctcatatgagctagtcacccatctccctactcggttgtctcctttcctcactttgtgtctcatctctgcctcttcttctgtgtgtccacatccactgcagccccaacaacaaccctgtggccccatctctcatcttgtatttctgttcccttcattctgtccctgttgcctgtcactctttgtcctctcccctttcccttaagtctcatcccttttgtgtctccatgttcctgtgtctgtgtctcatcctctcccgattcccatctcgtctgtgttcccattctttttcattttttgcctccatccccaacatcactctcccctttccccaatgcgtgtcctcatctcccctaaatccagtccctcctttatccattttatcgctcacctgagtgtactctcaggatcagaacccatccctccttctctgtcctcactcctccccagatcctgccacagcctcacctttgcgcttggtcttcgtgctgtgactcctgctcagtgggctgaggtggtgtccacgcactcctaggctgtcagatctctgagggcctcttctcactcctgaactccttaagagctggcccgggctacgctgtgtctgtttgggggtgggctgggagcatcactggatcaggaaatgaatcaggttcatgcctctccacttacatgtcccaaatacgtggacacctaaggatgcctgtacctgcctaaacatgttcagcaatgaggaagcttgaatcgtcacattcgaagactgtatttgttccctggccacatgattttaatgactctttaatagagcacctgacccaggtgtcaactgaaatcaatttcaggaagagttgtcattcatatcctctcatatacacttctggcccttgatcctgggaagagtcaatcactgtggtgttaagggttgcttcttctctgacctgaggcacagataggacagcctagaaagatgctttgtctggttccttgtcatctggagatactggttatctttcggaggagatggaacagacacgagggaagtgggtgaatgaatcatcactgtcacgaggcctggcaccatccccaatagcgaagccattccacaatgattcacaggcctctccagttccaggtaccaaccaaggccacatggctttagctggagaaggcagccaacacctctcaatttcacttgttccctcccttttttattgaaaattgcaaaaatttaatactgcccaaatgtttgtgtttaaaatgctgttgctgctctcgacatcctgccttagtgcttccttcaccttgtatgtcctgttccttgtggtggttacagctgtgtggagcatctgggtcagtgctactccaagctcttgtgagcttggaatatgacactcaggagaaccgagacaccaaggcagagaagcatcaccctctgtgggtgagaaggcctgtaaaactgagatgaggaatatttttgttttcagaatttacctgtaagtagtaggcaatctcagaatcttgggcatgcttcattcatgtggtcaacaaacatttatcgagcatctactaagtgtcaagatacttgggatatatcactgaacaaaaaaggcaaaaatggccaggtacggtggcccacacctgtaatcctagcactttgggaggccatggcaggaggattgcctaaggccacgaattcaagaccagcctgggcaatgtggcgaaaccctgtctctataaaaaatttgaaaaattagccaggcatggtggtgcatgcctgtggtcccagctactccagaggctgaggagggaggattgcttgagcttgagagataaaatctgcagtgaaaatcatgattgcaccactgcactccagcctgggtcacagagtgagaccctgtctcaaaaaacaaacaaacaaacaaacaaacaaacaacaaaaaacaaagacaaaagtccctgcctttgtagagcttacattccattggagaaagacagtaaaaaaaaatacgtatactttgctcaaagtgataatggctagggaaaaaagtagaacagtataggggttggtggtcagtaattttacgtaacatcgttgaaatcgctgactctggggcagagacttgaagataagagtgaacttgtgattatccggaggaagaatgttccaagtgaagagactagcactgcaaaagccccagagcagacagatgcctgaggtgttggaggaacagcagtgtgtccagtgtggctggagcaggtaactgagagttcagagagggaccagagaccaggtcattgggaagacttacggaccatttgaaggcctgtggcttttactccaagcacagtagggaaccctggaagggttctaagtagatgaataaagaacgtgtcagcttaaaggattacctggctgttgtgtggattataactgtggagaagtcgcacaacccatcctgatcataaagtttgtgttctggtccagaatttatgattctaagtcaggaggatggggagtttgttttgaggccaggaggacattattttagtagctggacagcacagctgtgggttgggggtcaggatgaaggatctttagaagcaaaagtggtgctggagatgagaaatgccactagatggcaaaagagaatcaagaacaagttcacacaggcctctggctcttctggtttgtcctcagcgaggccttggttgggggagcagctgttcacttctttgttaaggtatcccaaactttgcaggctgaacttctggatagaagttctggatagagaattatgcccctgctgccgtagaaacatgaatgttaggagataaaatccacggtttaaaccaggctgtgtatcaaatgtgtatcagcacaggccagtctagcctttggagtggaggctggatggaaggctgcaagctcatttgaatgcctagcttggtctcctttctacttctcattatcctagagtgggatgttttcaagccatgatttaaatttccctctacacttgtgttttcctgatattataattatcctagtttgctcttcaactcgagtatgctgggctgcgtagaaggctgccttaggactgtgtgaaagtgaaataaacatggccctgctgcttcagtccaaagggaaaagagagtaaggttttaagtttgcacatgaaaatcgaaattgagtcgtacctaccatacgtgcaattcaactgaaatctttgttttgcctcaattatttggataagggaggtgattttgtttgtgtgcccaaattatccagcttccaagatctgcttcaccttgtacttggtaggctgattttgctattttggcttcactgcattcatggggcaacagaaaaagatggaggaagggggacaagtttaggaagaacaaaaagattcaggcatcaggccagggactggttcaggagtttcacaggaggagaagaaagactctgagagagagagcaagagcagaagacaaaacagtgggagagaagacagaagggaagaaaaagtcccttacaccagcaatctctacccctgcttccttctcattctatcgtcgaagtcactgctgttggcccagcttctccttaggctgttgtgtgtgtgtttaagttggggcgggtgttgtgaaaatcccaacagtgccaggtggacctctgcctgtcttccccacaggacaacagctgctgcttcctctcgcctgtgctgggagggagtgaagggggaagggagagaggagggccgggcctggattggtgcctacccttcagagccaagcctctctgccttccggagttccacacagcctctggataccaatggaaagcccgtgagagttcccttccaagcaaaagcagatccaagttctgttatcctaattttgttggtcctttgataaataaaggtaatgggctcatttttgtagactgagaaagtgaaacatacagcaagttgaggtcagatgtgggactttcttcaggtccttgaattcccatgacctttcctggaacagctgtgggtcaggaggaggcagcactgacagaaatttggaatccttggctcccagaccaatgcgtttagacaagccaggatggaggaaagaggaaactgatttgggggttcactggggccttgtctcacaagccctcccagctccccatttatctacagagcaaagtatcatttccttagcctggtaatcagggtctgtcacaatcgggcaaacctgtctttctaactttatctctgatttttctcccactgagtgcctcaaccccagccagaccggtttccccccatttttcaagcatgtctttcataatcctctttatctccactgaacttctaacttcaccatgagatccatttccaagccagggtgacccttcaggaaaactttctctgaccctcccaattcagagacatctttctcacctctaaattcctacagcatttactgtcttcagaatgtataattttctgccttgaatcactggttatttcttcatgtgtatgtattatttttctcttagactgtcaattcccacaagatgaggaccacccgttacatttcttttgcacatttcacagtatatagcataatgccttgcatataagtgaccctaactgattcaacttttagaaggcattccgtctgctcctgaatgatcccagtctgaggtgggattgcctccagcccacagagatggttaacagatgaggaagtgacaatgcggcttctagacttcagccctgggtttgaggtgatgctatgagaagaaggttgagatggctgaggcaatccttcaggttcaaggacagcccaggaactgtccatgacacagtatattgtttgagcaacttgaattggacagggcaaaagataatgccaatgagatcatggtgagcccactcagagcaaaattttggggttctcctcagtcatagggagtcacccttgcacctgccaccctagccagttgttctataaatgcttaccattggggagggaagggagagaatgtgtaaatgattacatgcagagggtcatctttacaggaaaaacaactcagttattgtttcaatggtgaactatcaatacacatttttctggtagaatcagcaccattacaatcaacatttgtttaacaaaaatattttgatgtcccagatgtttatcatttttttaatacataagatacaagtaagtctgctttggttaagaaatttgattagctaattatttagaccagggcttcacaacctcagtgttatttacatcttggtctggataattctttgttatgggagctgtcctgtgaaatgtgggatgttcagcaatatccctggccacaggccagtagcaactcctggttgtgacaaccaaaaatgtctccagacattatccaattgtccctggaactactgaattagacatatgaccttgagcaagccactgtcactctagaacttagtttttcatccctagggaaatgcttgtgtatgtaaaacccggtgtaatggggtaacaatccc

SEQ ID NO: 94616 - DNA, 13384 bp, Homo sapiens
  misc_feature (1)...(13384): n = A,T,C or G
gtgtgtgtgtgtgtgtgtgtgtatttttttttttggtagagatgacgttttaccatgttgcccaggctggtctcaaactcctgagctcaaagcaatccacccacctcagcctcccaaagttctgggattacaggcgtgagccaccatgcccggctgccaaaacaaatttcttaacagacaaaaactaccaaagtttacctaagaagaaacagtcctgaatagccattatctttattattttttttttattattatttttctttgagacagagtcttgcctttcgccccaggctggagtgcaatggcgctatctcggctcactgcaagctccgcctcccgagttcatgccattctcctgcctcagcctctctagtaactgggactacaggtgctcgccaccacgcccggccaattttttgtatttttgagtaaagacggggtttcaccatgttagccaggaaggtctcaatctcctgacctcgtgatccgcccaccttggcctcccaaagtgctggattacaggcgtgagccaccgcgcccggccctgaatagccattatctattaaagaaattgaatttgtagtttaaatcttcccccagagaaaatctgtgtcaatacctgctgtacannnnnnnnnnnnnnnnnnnntgtatatacacgcttatatacacgcgtatatacacgcgtatatatacacgtatatgtgtgtgtgtgtgtgtgtgtgtgtgtgtgtgtatttttttttttggtagagatgacgttttaccatgttgcccaggctggtctcaaactcctgagctcaaagcaatccacccacctcagcctcccaaagttctgggattacaggcgtgagccaccatgcccggctgccaaaacaaatttcttaacagacaaaaactaccaaagtttacctaagaagaaacagtcctgaatagccattatctttatttttttttttttttattatttttctttgagacagagtcttgcctttcgcccaggctggagtgcaatggtgctgtctcacctcaccgcaacctccgtctcccgggttcaagcaattctcctgcctcagcctccatgggccataattctatgaaacttgtaatgctaatgctaaatcaagggttgtgaaaacactgccatctttatacaaaacccaacctccagccgggtgtggtggctcacacctgaaatctcagcactttgggaggccgaggcgggcggatcatctgaggtcgggagttccagaccagcctgaccaacatggagaaaccctgtctctactaaaaatacaaaattagccgggcatggtggcacatgcctgtaatcccagctactcaggaaggctgaggcaggagaatcacttgaacccgggagctggaggttgctgtgagcctaggccactgcactccagcctgggcaacaagagcgaaactcggtctcaaaaaacaaacaaacaaacaaaaacccaacctccaagttcctccacttaacatttaaaaactctagaaaggagggtgggtcggctgggtgcagtggctcatgcctgtaatcccagcactttgggaggccgaggcgggcagatcaagaggtcaggagattgggaccatcagttggtcccaattggtcagattgggctaacacggtgaaaccccgtttctactaaaaatgcaaaaagttagccgggcagggtggcacctgcctgtagtcccagctactcgggaggctgaggcaagagaatcgcctgaacccaggaggcggaagttgtagtgagccgagatcgcgccactgcattccagcctcagcgacagagcgagactccatctcaaaaaaaaaaaaagaaaggagggtgggtcaatcaggcaccacaactctgtggctcatccccctcccctccccctctgttatcagccactctccctgctgctcctcttcgagtcccaggggaacatcacttactcctttttagactctggcccatcatttcccttagcatagctaagatgggttgggagatccaaaaggatgttagtttaaatttttaaagtactgaacatactcagtaccaatgaacacatctggtgcctagattgggttttctaaatactgttctctgctaaaaggaatcagagctttctgaagacctggttgatctcaagactggggcagacaaggagaaagattagcctgaaacatttttgttgtgccaggaaataaggcagtgctgggaaaaaaaaaaaaaaaaaaaagtaatgttggctgggtgccgtggctcacgcctgtaacgcctgcactttgggaggccaaggtggttggatcacttgaggtcaggagttcgagaccagcctggccaacatggcgaaaccccatctctactaaaaatacaaaaattggctgggcgcggtgtctcacgcctgtaatcccagcactttgggaggccgagatgggcggatcacgaggtcaggagatcgagaccatcctggctaacacggtgaaaccccgtctctactaaaatatgaaaacaaaaaattagccaggtgtggtggtgggcgcctgtagtcccagccactcaggaggctgaggcaggagaatggtgtaaactcaggaggcggagcttgcaatgagccgagatcgcaccactgcactccagcctgggtgacagagcgagactccgtcgcaaaaaaaaaaaaaaaaaaaaacaagcaaacaaacaaattagccgggcgtggtggcgggtacctgtaatcccagctactcaggaggctgaggcaggagaactgcttgaacccagaaggcagaggttgcagtgagccaagatcgcgccactgcacttcagcctaggtgacagagccagactgtgtctcaaaaaaaaaaagaaaaaaagtaatgtcaaaagacatggaagtgccgggtgactcatgtctgtagtcgcagcacttcaggaggccaaggtgggaggatcacttaaggccaggagttggagactggcctgggcaacatagtgagatcctgtcttcacacacacacacacacacacacacacacacaaattttttaaaggacatggaagccaaattaaaggggctccctccggtcaaaactggaataatttgagcattaaaataagaactgaaattaattataatctattgaataaaaccaaagtccatattgataatacacatgaatgaaaaaggagtggggagggctcttttttatagtctaatgccaaatgacaaaaatggagggaatgctggagttagaaaatcaacattgtgcaaccaatatgataaaaactggctaggggccaggtgcagtggctcacacctgtaatcccagcactttgggaggctaaggtgggtggatgacttgagatcaagagttcgagaccagcctggccaatatggtgaaaccccatgtctactaaaaattaaaaaaaaaaaaaaattagccgggcgtggtgtcatatgcctgtagtcccagctactcaggaagctgaagcaggagaatcacttgagcccgggagtcagaggttacagtgagccgagactgcaccactgcactcccgccttggtgacagagcgagactctgtctcaataaacaaacaaacaaacaattggctagggtaaaatcatgaatggatactgatgcagggcaggcaagccccatagtagggcttagcccatgagggtctgtggcttcacccaggaaagagggcaagctggtggtagggtagaagaaaacagccttattgaagtggcagtgttacagctctgtgactgctctgcagagcagggctaccccatcggcagtgtgctgacagtagccgcttagggcagtttagaggtcatatttacacctccttttaattacaagtagattaaggagtggtttatgcagaaatttctagagaattggtagtaacttttgggtcatcgggtcatcaccatggaaaagggtggtaactcctaggtattgccatggcgatggcacacttgtgggtgtgtgtcttatggaaagctgcttccgccccattcctgttttagctagtcttcaatttggtccagtgtccaagccctgcctgtggaatcaagtcccgcttcctacctcaatactaaatctaggtggggaaagtatgaagctgggcagggttatttgcatgatctcaaagtgtctccccacagattgtttacaaattgttacaagttcacaagttacaaaatagtaactatatatcatggagaaaccagacaacatcatgagcaagtttgacattgattaaattaacatcaccagtaaggagcaggtagacattgtagggcttgggtagggcttccccttaaaagaacacaacacaatttatgtcatatttcaggtcagatgcataacctaaactcggtcatgagaaaacaccaggaaaacacaaattgatgaacattctataaaatagctggcctgtatttctttttaatgccagtgtcattaatgacaaagaaaggctgaggaactattttagatcaaaggagacaaagagcatgacaacaaaatgcaatccatgctcctgaactgggccttgtactggagggaggagtgctatcaagggtgttattgggacagttgacaatggtggaatatgaattttatagtgccaatgttaaatttcctgtatttgatcattgtaccatgatatacattttgttaattatagagacagggtcttgctctgttgcccaggatggagtgcagtggctcaatcatagctcactgcagcttcaaactcctacgttcaagcaatcctcccacctcagcctccagagcagctgggactataggagcatgccaccatgctgggctaacttatttattattttttttatagaaacaggatcttgctgtgttgtccaggcttattttgaactcctggagtcaagggataccttgacccacgtcagcctctcaaagcgttggggttgcaagtgtgagccaccttgcctagcctgtaccatgatttttttttttttttttttttgagacggagtctcactctgtcgcccaggctggagtgcagtggcatgatctcagctcactgcaacctccgcttccagggttcaagtgattctcctgcctcagcctcccaagtagctgggattacaggcatgcaccaccacacctgtctaaacatgtaccatgattatttaagagaatattcttgttgttgagaaatatgcattatagtattaagagataaagggtcataatatatgcactgactctcacatgattcagaaaaaaatgagtataatgcatttagagagagaatgacaaagcaaatttgtcaaaatgtgagaaatggataaatctgggtaaagaatatataggaggtctctgtaactaagaataatgacaagaatgcaacttttctataagtttgaaattatttcagaataaaaaggttttgactatagtcctctgctgtaccagttgagttattgaaggatgctataaaaaaggtttttaaaaggcacataaacagaagagaaacagtcaaatgaggactagggtgtataaggacagttccaagtggccagttgaattctgactttagcttgttctcttttatctactttttttttttttagacagagtttcgcacttgttgcccagactggggtgcaatggcacgatctcggctcaccacaacctccacctcccaggttcaagcgattctcctaccttagcctcccgagtagctgggatttatctactttcttaaaagggctcttactctcaacctcagagagctgctatgacatcataggtaccccatccagcttctgaccttcccaggtcccggccttcctccctgtgaagggcaacatcttccttccccagtcaaggggaggctggtccctggatcctagagactaggatactttgattccttttgctcttaccgaaaccaaaaccaaaaccaaatgccaacaaaaaactattctagagtttctaaggatcatgtctgcgagccaggattcctgatccagagacaayggccccratgggatggagcccaaaggtgtcattgagagtaactggaatgagattgttgacagctttgatgacatgaacctctcagagtcccttctccgtggcatctaygcctatggtttagagaagccgtctgccatccagcagcgagccattctaccttgtatcaaggrttatcacgtgattgctcaagcccaatctggggctgggaaaatggccacatttgccatattgattctgcagcagattgaattagatctaaaagccacccaggccttgctcctagcacccactcaagaattggctcagcagatacagaaggtggtcatggcactaggagactacatgggtgcctcctgtcatgcctgtatcaggggcaccaacatgcgtgctgaggtgcagaaactgcagacgaagctcctcacatcattgtgggtacccctggccatgtgtttgatatgcttaacgggagatacctgtctcccaaatacatcaagatgtttgtactggacgaagctgacgaaatgttaagccgtggattcaaggaccagatctatgacatattccaaaagctcaacagcaacacccaggtagttttgctgtcagctgcgatgccttctgatgtgcttgaggtgaccaagaagttcatgagggacctcattcggattcttgtcacgaaggaagtgttgaccttggagggtatccgccaattctacatcaatttggaacgagaggagtggaagctggacacactatgtgacttgtatgaaaccctgaccatcaccccaggcagtcatcttcatcaacacccggaggaaggtggactggctcaccgagaagatgcatgctcgagatttcactgtcttcaccattcgtggagatatggaccaaaacgaacragacgtgatcttgagggagtttcgttatggctctagcagttttgattaccactgacctgctggccagaggcattgatgtgcaacaggtttctttagtcaccaactatgaccttcccaccaacagggaaaaccatatccatagaatcggtcgaggtggacggtttggccgtaaaggtgtggctattaacgtggtgacagaagaagacaagaggactcttcgagacatcgagatcttctacaactcctccattgaggaaatgcccctcaatgttgctgacctcatctgaggggctgtcctgccacccagccccagccagggctctatctcggggggctgaggagcagcaggagtggggagggaagggagccaagggatggacatcttgtcatttttttctttgaataaatgtcactttttgaggcaaaaacaaaacaaaacaaaacactctaacattgcaacccactcaggcgtttccaatgcctttattttcctatttgagggaaatatcatttccccaggccaagggcaagatgggtgactaaacctggaaatggcctcaaccttcctgcaagtagtagatccacagcacatggttaataatttatgctattaaggttaggctactaaggctattaaggtgtacggtcctaacggacacacctatgaattagatatacctgtcaacagaagccggtcagatccatggttaagaaccagaataagatggtctgagtttagtttctgactccaccacttacaagttgtgtgactggctgggtgtggcggctctgcctagaatcctggccctttggaaggttgaggctggaaggttgctttgagcccaggagtttgagaccagcctgggcaacatagccagaccctgtctctattttatgtaggaggctgaggtaggcggatcacgaggtcaggagatcgagaccatcctggctaacatggtgaaaccccctctctactaaaaatacaaaaaaattagccgggcgtggtggcaggcgcctgtagtcccagctactcgggaggctgaggcaggagaatggcgtgaacccgggaggcagagcttgcagtgagccgagatcgcgccactgcactccagcctgggcgacagagcgagactccaactcaaaaaaaaaaaaaaaatgttgtataactgagagaaggcaactagttcccggagctcatgaaccattcactcaacaaagtaaccacctcataagcaccagacactattttgggaggtagcaaaatgtaagctctctgcgctcagagcttacattccagttagatgagacagaaactttaaaaataaataattaaaatatagcatatactattattgaatccagagattccgaggctgaattttgggaaaggaggaaaagaaacatcagttttataaagttaaaaggaaaaaaaaaaaaacaggtgattaactgattttatgttctgttcttctggccttctctttaaaatatttctcaaatggagattattcaaggaatttgaagattttatttttgttttctggctttgctttgagttgaaaagaagcttttttttctgtatttgagacattttgcaaatacacagaatcctttaagagtagagtttggagtttacattgaaggtctcaaaaattctattattaggggaaattaaaataccattcataatgagaatcacaattttataggggaattactagtaatttatgaaaggctttttttctccaaatggtcaaaagaattgtgttggaaatttggatgttcttttgctatggttcgtacagtctgtatttgcctcttcaaataactttggatgacttttacatggccacattactgtttccataaatgatatttttaggaactggaaataacaaaaagttctggtagtcttgccacttgtccttaataacttgtgtagctaaatatctctttcccaaaaagtgagtgagaagcaataccagctaggattttaaatgataaatggatgggctgggcgcggtggctcacaccagtaataccagtactttgggaggccgaggcgggaggatcacttgaggtcaggagttcgagaccagcctggccaacatggtgaaaccccatttctactaaaaatacaaaaaattagtcgggtgtggtagcacgcacctgtaatcccagctacttgggaggctgaggcaggagactcacttgaacccggaaggcggaggttgcagtgagcggaaatcacgccattgcactccagcttgggcaacaagagcgaaactctgtctcaaaaaaaaaaagttaaatgatgtttttatgtaagacagtaagaaaaccacaggacatacagtggtttggttgctggttagttgtctttattgttaacttttctattgtttaaatttcagaagaaaaatctttgtgtgcatgttaagatttttcaagattgataattacataaggctctggtctcaagatccaatcagtacccattttgtttcaatgtcaccaaagtaaaattgattatagggtgactctgcttttttcttttttttatatatacgtatttttttttattatacttaaagttctagggtgcatgtgcacaacgtgcaggtttgttgcatatgtatacatgtgccatgttggtgtgctgcacccattaactcgtcatttacattaggtatatcaactctgcttttttctctcccattaaaggtttttgggaaaaaaaaacattgttcctctcttacacatgcttttttattttacctttttgagacaaattctcacgctgttactcaggctggagtgctgatgcaatcacagctcactgcagcctcaacctcctgggcccaagcaatcttaccacctcctctgagacagctgagaccacaggtgtgcaccatcatgtctggctaattttaaaaaatttttctttttttagagatggggtcttgctatgttgcccaggctggtcttgaactcccagactcaagcgattctcccacatcagcctcacaaagtgctaggattataggcatgagccaccacacctggccacatcttgtttaaaaaaaaaaataaagatcctcattatttgattgaatgttttgttttgcttcgttttttgagacagagtctcgctctgtcgcccaggctaaggtgcgatggcgtgatctcagctcactgcaagctccgcttcctgggttcaagcgattctcccaccttaaccttccgagtagctgggattacaggcgccagccatcatgcctggctaatttttgtatttttagtagagacggagtttcaccatgttggccaggctggtctcgaactcctgacctcaggtgatccacccgcctcggcctcccaaagtgctgggattacaggcgtgagccactgtgctcggccggttgaatgttaataaattttaaaaacataccaaaagaatgcagttgaaattttaactttattattttcctattacaaaagcaacacatattcattacataataaaagggagggagctcaaaagatataaagaagtctatgttttttttgtttgtttgtttttttaaaggagtctgttttaaaattgcctattatcctattccagggaaaactattaacattttgccatatttcattttatcagtcttttcctatgtatttttgaacacagctcaaatattactctatataaagacttgtattcagctttttcaacataaattacattaaagttatttttatgtcaataaaaattatctttgtaaacaaaattttaatggcaaaataacatttcatcatatagacatactgtaatttatttaaacactctcctaaaatcaaatatttagttaggagaaagttagtaggtcaaagcatataaacattgcgcaggtcactgtggcctaaaaaggctgttcttttttattttttttggaacagagtctcgtactgttgcccagcctggagtgcaggggtgcaatctcggctcactgcaacctctgccccctgggttcaagcaattctgccccaacctcctgagtagctgggtttacaggcacaggccaccatgctcggctaatttttgtatttttagtagagacagggtttcaccttattggccaggctggtctcgaactcctgacctcaagtgatccacccgcctcggcctcccaaagtgctgggattacaggcgtgagccactgcacccggcctcaaaggctgggagggaatgcagtgactctgcgggtgaggggtggtatcaaggccggcagcaagacagagaaggctcacaggtcctggcctagccgctccagctcgttgaggaggaagtccatatcagcacaggtcagtgcagagttggccacaaccacacggaagaagttgccccgggtcccgtggggctggtagccaatcatcatggagccctccttcaccatgcgctccttgagcacgggggccacctgtggaagggtggagagagattccagctgcagcctgggtcggctgacaggtaggctggcttcttgtcctgccaggcttccagaggtgcttttccttcccacccagccaccttctgggggtagcacaccttgctcagaccttgaccttggcctcagtttacctttctgtcatatctaacctgcttggccttcgctatcttctgcttttctccccatttctcctgtctccaagaaatctgtcctgtgggacattttctgccaaatcttgactttctcttgattcctaacactgctttagtctaacttcaagccttggtcatctaagccttagtcaacaccttcttctcccctctcttaattcctgtaatatttttgataatattaatctgtgccctgtgatctagcaagtaatttacaacactgccttgaacacattgcttccaagtaggtaactcttgccttataataacaactccataagggcaagaacatttgtcctttcagatcatctgcagcacctagtaccactctatctttagggaccaggatataacacagctcctcgcctccagatggcacttctagactggctttctcgggttgctgtgtccctagcacgggtaataaggcttttccatgatcattctgcctcatatctgtcctgggcctgagttcccagcccaattgccagcacaaggctctgtgtactacacactggtgacttctctgacttctcctgtaacacacgtcgctgcttcttacttcccagaaacataccttcctccccatccccacccctaccgaaaagagagcatccacgcctcagagcaagagaccagcaaggagacctgccatgccactcccagccaacagggggcagaagcgcatcagttgcatcagctccctaacgggtaaagagagcagcacagcacgcctacctttgacagcctttcgtggtaatctggactctcctgcttccctcgcaggctggggggtacgaaccagaaacacacattgacaaactcaggctgagaggaatgagaaagaggaaggtgtgagctgagaaagggggaccgttttccctctccctgcccctttcccctctccctgcccttttccctccactagggctttagttggggcttgggggctgcaaaagagctaggctggggcaggggccacaaaatagaaaggggtcctacctccatgactagctcaaacccttcccgcttcttcatttcctccaccaggtacctgtgaacagagagtgagaaaccataggcggggaggaaaagcagagatccagacagaagaggcccacgtagaatgagccacagagagaccgagagaaaagtaatcccgggagcaggaaagagggaggggcatggacccaggagaggggaacagggacgaccccccacctcctcccgcctaccgggcaaggacaaaggcctggtcgatgcgccgctccagcccttgatcgccctgtgccttccacatgagccacagcttcagacagtccacacggcggccacactgcaccaccttgtctcccgtgtccagagccacatcgtagaacttgtcctgctggaaaaggtagctggcctgggacccatggcagcgcttgagcaggttctgtgtgggggtgaggagattgtcagaccctaccctctccaccgaggctttcctccagggctgcactgtgggggtcttagctcaggataccctcttctttccctggagccagatggcactgctgggacggctgcctgctggctccaacacctttctttgggtttcctcccaatacccagggttcttcccaaactctgatggcaacctcaagctagaaactccaggatacctctgactccaacttcaagctggaaacttttcttttaagagaggccactgggggagtgaaggagcctaatacaggttagggtggtagctg

SEQ ID NO: 94617 - DNA, 18659 bp, Homo sapiens
gcctgacaacatagcaaataaaattctttttaaaaaattaactggtgtagtggtacatgcctgtggtcctggctgctcaggaggctgaggtgggaggatcaacactgcactccagcctgggcaacagggtaagaccctgtttcaaaaagaaaaaaaataaagattaatgtctctgaccatttctgtgcttgacaggcatttaggaatctttcatatacttcagggcctgcataactcttagggctaataatgtgatacctatttgaatttgttattccacattgcttttctgacttctgatcaccacttagtaggtccattctactaagagcacctttgagttgctctttgcctctggattttttattgtatgagacaaataaactcctgtctaagccagtattgatgaagttttctactgcttgctagaaaacttggttggttttttttctttgtttgtttgttttgagaaagttctgctatgttgcccaggctggagtgcagtggctcgatcttggctcactgcaacctcaaccttccaggtttaagagattctcgtgcctcaacctcccgagtagctgggaatacaggtgcacaccaccacccagctaatttttgtattcttagtagagatggagtttcaccatgttggccaggctggtcttgaactcctgacctcaggtgatccgactgccttggcctcccaaagtgctgggattacaggtgtgagccactgtgcctgactgagaacttggtttagaatcatctgagaatttgagtcatgggaaaggatgaggttcatcttggagggtatgtaaggaaacaaaacaagatcaaatgcttaattctgacagaggagaaatttgtgaaaaagctaaaggggaaatggtaaaggaaacatgagagaaaagtcaaagccatcaaggaaaggaagctttccaatcaaggaggtgatgaaacctgtctgatgcaggcagtgtcagacctgcaaaaagcacctgggtttgtgggctgagaggtcactgatggtctcagcagaagcggtttccattcagcctggagagcagaggcaccaagctaggccttgggcaagaggcacagagaagacaagttactacccaaagtcgtctgttttcataattttgaataccctaattttttccctggttaccttctctcttgctcaggcacatttttgagataagcatttgtttataagatgctatatgatcaggagctacagttgagtttcagagttctgcttgctggcatggaacacctccatctagccagaacagggcactgttgagttcagctggatttgcttttggtctgattcatccaaataaggcatggacagctccacattcctgaggttctgtgtcygctgatattttccacagttagacagtcccactcaacagataatgtcagaaaaggaacccccagaatatcagctccccacttaacaaacaaaacatgaacatttgtattcttgagtgtacataccccatgcctgtgtagatgaaatgacaagaactaggactttgctgtgacaatgctgacggtgacaaaaaggcaggacttcaaatagtagcgagagggaggacaagtcacaaggatgtattcatttatttgttttgagacgaagtctcagtctgtcacccacgctggagtgcagtggctcgatcttggctcactacaacctccacctcccaggttcaagcgattcccctgccttagcctcctgagcagctgggactacaggagcccaccaccataccaggctaatatttgtatttttagtagagacggggtttcgccatgttggccaggctggtcttgaactcctgacctcaagtgatccacctgcctcggcctcccaaagttctgggattacaggtatgagccactgtacccagccggatgtatttatttttatttttatttttatttttgagacagggtcttgctctgttacccaggctggagtgtagtggcaccatcatggctcactgcagcctcaacctcctgggctcaagtgatcctcccatctcagcctcccgagtagctgggactataggtatgcaccaccgtgcttggctaatttttatttttaaaaatgttttgaccgggcacagtggttcatgcctgtaatcccagcactttgggaggctgaggcaggcggatcacctgaggtcaggagttcgagaccagcctgaccaacatgatgaatcccatctctactaaaaatataaaattagctgggcatggtggtgcatgcctgtaatcccagctacttgggaggctgaggcaggagaattgcttgaagccaggacgtggaggttgcagtgagccaagatcacgccattcattgacctccagcctgggcttcaagagtaaaactcactctgtctcaaaaaataaataaataaataaataaataaataaataaaaataaaataggccgggcatggtggctcacacctgtaatcccagcactttgggaggccgaagtgggtggatcacctgaggttgggagcttaagaccagcctgaccaacacgagaaaccccatctctactaaaaatacaaaattagccgggagtgatggcgcatgcctgtaatcccagctacttgtaaggctgaggcaggagaattgcttgaacccaggaggcggaggttgcagtgagccgagatcaagccattgcactccgtcaagagcgaaactctgtctcaaacaaataaaaataaaaaataaaagaaaatacatatttttttgtagaagcagggtttccctctgttgcccaggctggtgttgaactcctgggctcaaccgatcctcctgccttggcctcccaaagcactggcattacaggcgtgagccaccacgcccagcctatttattattcattcatgcattcatttacttttttttttttgagatggaatctcaccccatcccccagactggagtgcagtggtgtgatctcagctcactgcaacctccgtctcccaagcttaagtgattctcctgcctcagcttcctgagtagctgggattacagatgcgcaccaccatgcccggctaacttttgtatttttagtagagacggggtttcaccatatttgtcaggctggtcttgaactcctgacctcatgatccactcacctcagtctcccaaagtgctgggattacaggcgtgagccactgtgcccagccctaatttttgtactttttagtagagatgggttttccctgtgttggccaggctagtcttgaactcctggcctcaagtgacccacttacctcggcctcccgaagtgctgcaattacagtgtgagccaccatgcccagccctgcccagttaatttttgtatttttagtagagatagggtttcactatgttgtccaagctggtcttgaactcctgacctcaaattatccacccgcctctgcctcccaaagtgctaggattacaggcatgagccacctcacccggcctcattcatttacttctttggaggagttcctaactgctctacgttttaggatggagagagaaatggtaagaatttatgcctgaaggccttgggcattttttttcagtgtcagatgaggacaagtggctttcttaagatcacaaagcaagaagtgatgtggagtgggggggaaaaaagcagtttccagtttggctttgctaacactcataagcgattactctgaacaagaagccagagctttactttacgcatctgtaaaatggggataatgggatggtgatgagaacaaaacaacatagtctaaatttccaacacaggctgagcatggcggttcacctgtaatgctagaactttgggaggccaaggtgggagaatcctttaagccctggagtttgagaccagccctgataacacagccagaaccagtttctgtaaaaaaaatttaaattagctggcacagtggcttgtgcctttagtcccagacatttgggaggttgaggagggaggaatgcttcagtccaagagttcgaggttacagtgagctaggattgcaccactgcactccagactaaccaacagagtgagaccctatctcaaataaataaattcctaacacgttggctcatggttattaacaatggcaagaggccagaaactgtacttcatctatcagatgaattatcatttttgtctcaccacaaccctatcctggttgtgcagatgaagaaactgagttttagaaacattaaacaacgtccaggtgcagcagctcacgcctataatcccagcacttttgggaggctgaggcgggtggatcgcttgagtccaggagtttgagaccagcctgggcgatgtggcgaaaccccatctttacaaaacacacacacacaaaatgagctgggtgtgggtgcatgcctgtagtcccagctacttgggaggctaaggtgggacgcttgctcgagcacgggaaggggaggttgcagtgagccrataacacaccactgcacttccagcctaggtgagagtgagaccttgtctcaaaaaaacaaaaagaaacattaaataatatccttaatattgcaacttaagtgacagcccaggatatatgaattcccttgtaaggttttcttaacaaaacaccagtcacataagtgcattttattttatatttttgtttatttatttgagacggagtctctgtctctcaggctggagtgcagtggcgccatctctgctcgctgcaacctccacctcctgggttccagcgattctcctgcctcagcctcccgagggggtagctgggactacaggtgcgcaccaccatgcccagctaattttgtatttttcgtagagatggggtttcaccatgttgtccaggctggtcttgaactcctgacctcaggtgatcctcccgcctcggcctcccaaagtgctggaattacaggcgtgatccaccgcacccggcctattttttgagagagggtcacactctgtcgtcccggctggaatgcagtgatgcgatcaccgcccactacagcctcgacctccgggctcaagcaatcctccccgcccagcctcctgagtagcgagcgcctcgacgcccagctaatttttatttttatttatttttttgtagagacggcgtctctctaagatgcccaggctggtggccggtgtcgaactcctaagatgaagcgatcctccccggccttggcctccgcgcctcctaaagcgccaggtatgagccaccgcgcctggcctacaagtgcattttaattaaagtattattaatgtctttgcctgaagaaattcgcttttaaattgtgacttatctttcacccaaaaatcaaagcacaattcagccccgaggcgggggcggtaggagctgggcggggcgggggcagggaaagaccaggagcagagattcaaaaagagtaagagggcaaaatgtgcataatgcatcttcacaggtaagagcctggccaggctcctgttttaatggcttcctcctgaagaagattcaagcagagtgtaagatattttcggaaagtagagcattttgaaagcatttcataatctctcaaaaccggagactgctcctgtcccacctcgttagagaaaacagcgatgctcaaaggcaacctccttcctgacattgcctggtaggacgcgacgtggtgtttgcccgcgcggaatgcggacgcaaggctgctcctaggtctcggggacgcgccatccccatttccgctcgcggaggcgtagggtccgggcgcgggaccccagtcgaccttgactggcggcgcgaccttgaggcctgcgttcgcctcagttgccccctctgtgcaatggggagacgcgcctcatcgcttgacaacggccgaagagccgccgcgcttccgtctcccgcgtgcgcgcgccatgctgcccacccccgttccgcactgaccctcccccgtgccccgcgtcccgtactgccgccccgccccgagtcccatgccgcagccaccgcgacggagcccgcaggcgggaacctgcctccgcgcgttagcgcgcacgcgcgcctcatgtgtcgtccccatcagcgccggcttccgtctataggccagatgcactgtcactctggcgaagtcgcagacccgattggccgggacggaggcgcgagaccgggttgcgggcggggccgaacgtggtataaaaggggcgggaggccaggctcgtgccgttttgcagacgccaccgccgaggaaaaccgtgtrctattagccatggtcaaccccaccgtgttcttcgacattgccgtcgacggcgagcccttgggccgcgtctcctttgaggtcgggcgggcggcggcgtgcgggaatggggcccagaaagtgggccggggtcggggtgggtggtagcgccccaaaggcccgggcgcggggcgaccctgcttgaggggcgagcgcgggcgggctgcggcgccatttcctgacgaggggccattttgggaggtccgcgagtcgcggggaggaggccgggacggcggcggacaaaggcaggcggggcggctgcgaggccgttgggggagggggcccgcgtccgcccgcccgcctcatgtggccgcgccctgtcctgtccgacgcacgtgctcggcggccgcgctcaggtccgcgccttgagagtcgttgggctccgccctagcttggcctgggcgccgcagaccggagccagaagcacgctcgcgggggcttgcgaccgccttcctgggaagctgtcccctggcaggcatgggtgctttacatcctgagctgggaagctgtttgcttgagggtttttctcaaggatcgaggcgcggtgtgagcccgtccatgctcggtcctgtagatcccgggaggccatgttataaaaggagacttgctgggatgtgacgggttgccacttgaaatatcttccatttggataaagtaggaatatttatacatgtgccccaaacgtccctccgtgtcccccacccccaagcggaaatgtgaaaatgggccttgcctttgctggtgcccaaggaccgccttccactgcagtgacggcgctggcgggggaggcgctcttgagcccctcccgattgtccctctgcctagcaagcaagttgcgactggccacaaggcaggcctcttccgaccaaggtggattaccagtgattacctaattagttttgagagcgttaaatgagttcttaaagatcagttgtaattatagcatagtatctaaacttggcgcgtgtcttmaaagttaaatattgagtacgattccgttccagttaacatggatagaccttagggagtagcgaaataggatgttagtggttttattcctttaaatcacatctcaaaaggccaccaatggctagtttgggatcttattccgaaaatagattgatcctcatgcagtcttcgtgaggacagagcgatttccttgttgcctaccctgtccatagtgcctggcacataggcactgaaacactgcatgttaatccacaccccaccccacctatgagtgtagtcaaagctggtaagtgacaagggctttcgtggaaacttggcctgacctaatgttgggcatcaggttacccaaagagcttcagggaaatgagaaaggacttgcaggtcttgatgagaatggaggggtaactgccaatgagggctttggctttagcgaaagtctgaaagggaagccataggaacttaaacgtaccgactataaagctctgagaaaagctgatgttttagaaagaccatacattctaggtacaaatacctaaaaactaaaaaataagtacgttggccaggcgggcggatcacgaagtcaggagattgagaccatcctggccaacatggtgaaaccccacctctattaaaaatacaaaaattagctgggcgtggtggcgcttgcctgtaatctcagctactctagaggctgaggcaggagaatcgcttgaaccccggaggcggaggctgcagtgagccgagatcgtgccactgcactccagcctggtgacagygagactcttgtctcaaaaaaaaaaaagtacattgctataagwgaagtgcacacggatactagtagttaattcagtcacatctgtgaaatagcttataaaatgctacttttaaacaagctgtttttatgaaagggcttgtaaatgtttatggtatttaagctacctctctagccataacgtattatacattcaagaaaggttcaaaaccagatatactagaaaccaatctttattttttaccccactactaggtaaggggcctggataccaagaagtgactgctcatctaatccataaagctatgttaacagattggaggtagtagcattttcattacaagtgactaaaagaacagctgtttacccctgatcgtgcagcagtgcttgctgttccttagaattttgccttgtaagttctagctcaagttggggggtggtgatagacatttaagaagccatatatcttttcagaagtaggtgtgatgtactaaaagtttgagacactttctagaagtctcactatttaagttatgactagtattggatttttggcatgtctttgggtttcatgtttcttaacccaactgcctgcagggccttatggctgtcaggagcagttcttgggaattaaagtaattactgaagaagtattctagtgagaaaatgaatttatgactcagaagcccctaaagacatgggtactaagcaacaaaataagcagatgttaattaactgtaattttctcttacagctgtttgcagacaaggtcccaaagacagcaggttggtccattttctaagtttaacaaagatgttccaattgtgacagtttgtgtgtgtgtgtgtatatatatatttttatgtatgtatatatgtgtttaatttttttttaaacagaaaattttcgtgctctgagcactggagagaaaggatttggttataagggttcctgctttcacagaattattccagggtttatgtgtcaggtacgaaatttactgaattttattttatttgggttgctcccttcatttgggattgagccagaatatttcaggatacacatatctgaactgttactctaccatttcggttctatttaacccttctattcagtttgaacttgggtttaaagtttgaaccttgcagatttggcacacttcatggttatgttgtcagaagtgacatttttcctatatgttgacagggtggwgacttcacacgccataatggcactggtggcaagtccatctatggggagaaatttgaagatgagaacttcatcctaaagcatacgggtcctggcatcttgtccatggcaaatgctggacccaacacaaatggttcccagtttttcatctgcactgccaagactgagtggtaagggtacaacatggcacactaaccacctgactaaatgaaaagttgccctggggggaacggaacaaacactacttttcttcaacctttgcttccacagactttttcatccctaagatactagaagaagagcatacataaaygacaaatatagccaatgtgatacagaatgtcagatactatgatagaaacttggcccttagctgggtggttgaattaggtgctacttttttgagatggagttttgctctgttgccaggttggagtgcagtggcacaatctgggctcactgcaacctctgcctcctgggttcaagcgattctcctgccttggcctcctgagtagctgagaatacagatgtgtgccagcatgcctggctaattttttgtatttttgtggagacggggtttcatcatgttggccaagctggtcttgaactcgtgacttaaggtgaaccacctgccttggccccccaaagtgctgggatttcaggcatgagccactgcgcccaaccaattaagtgcttttttttttttttcttttctcagactggatctcgctcttatctcccaggttggagtgcagtggtgccatctcagctcactgcaacctcctcccgggttcaagcaattcttctgcctcagcctctcaagtagctggaactacaggcatgcaccaccactcccagctaaattgtgtattattagtagagcgggatttaccatgttgtccaggctggtctcgaactcctgggctcaagtgatctgcctgccttgacccccccgaagtgctgggattacaggcatgagccactgtgcccacccaattaagtgctgcttttatgttactattaataacatgcggttggttgggttttttgtttctttggggtttttgttttgttttgtttgtttttgggggaggggggcgcaattcattctatatgtgtaactcttttttgagatggagtttcgctctgtcgcccaggctggagtgcagtggcgcgatctcggctcactgcaagctccgcctcccaggttcacgccattctcctgcctcagcctcccgagtagctgggactataggcacacgccaccatgcccggctaattttttgtatttttagtagagacagggtttcaccgtgttagccaggatggtctcgatctcctgacctcgtgatccgcccgccttggcctcccaaagtgctgggattacaggcgtgagccaccgcacccggcctatatgtgtaactctttaatggtaattggagaatcatgtttaatgacatttagtacaaaaggcttcagttaaaaaaaaaaaaaaaaagctacctttctcgtcttggttcatgacacatggaggctgcttgtttgtggttgccagtcatartgattgttcttccttttcaaggttggatggcaagcatgtggtgtttggcaaagtgaaagaaggcatgaatattgtggaggccatggagcgctttgggtccaggaatggcaagaccagcaagaagatcaccattgctgactgtggacaactcgaataagtttgacttgtgttttatcttaaccaccagatcattccttctgtagctcaggagagcaccyctccaccccatttgctcgcagtatcctagaatctttgtgctctcgctgcagttccctttgggttccatgttttccttgttccctcccatgcctagctggattgcagagttaagtttatgattatgaaataaaaactaaataacaattgtcctcgtttgagttaagtgttgatgtaggctttattttaagcagtaatgggttacttctgaaacatcacttgtttgcttaattctacacagtacttagattttttttactttccagtcccaggaagtgtcaatgtttgttgagtggaatattgaaaatgtaggcagcaactgggcatggtggctcactgtctgtaatgtattacctgaggcagaagaccacctgagggtaggagtcaagatcagcctgggcaacatagtgagacgctgtctctacaaaaaataattagcctggcctggtggtgcatgcctagtcctagctgatctggaggctgacgtgggaggattgcttgagcctagagtgagctattatcatgccactgtacagcctgggtgttcacagatcttgtgtctcmaaggtaggcagaggcaggaaaagcaaggagccagaattaagaggttgggtcagtctgcagtgagttcatgcatttagaggtgttcttcaagatgactaatgtcaaaaattgagacatctgttgcggttcttttttttttttttttttyccctggaatgcagkggcgtgatctcagctcactgcagcctccgcctcctgggttcaagtgattctagtgcctcagcctcctgagtagctgggataacgggcgtgtgccaccatgcccagctaatttttgtatttttagtatagatggggtttcatcattttgaccaggctggtctcaaactcttgacctcagctgatgcgcctgccttggcctcccaaactgctgagattacagatgtgagccaccgcaccctacctcattttctgtaacaaagctaagcttgaacactgttgatgttcttgagggaagcatattgggctttaggctgtaggtcaagtttatacatcttaattatggtggaattcctatgtagagtctaaaaagccaggtacttggtgctacagtcagtctccctgcagagggttaaggcgcagactacctgcagtgaggaggtactgcttgtagcatatagagcctctccctagctttggttatggaggctttgaggttttgcaaacctgaccaatttaagccataagatctggtcaaagggatacccttcccactaaggacttggtttctcaggaaattatatgtacagtgcttgctggcagttagatgtcaggacartctaagctgagaaaaccccttctctgcccaccttaacagacctctagggttcttaacccagcaatcaagtttgcctatcctagaggtggcggatttgatcatttggtgtgttgggcaatttttkttttactgtctggttccttctgcgtgaattaccaccaccaccacttgtgcatctcagtcttgtgtgttgtctggttacgtattccctgggtgataccattcaatgtcttaatgtacttgtggctcagacctgagtgcaaggtggaaataaacatcaaacatcttttcattatccctagtatttcttattccattaattaacagaatagcctcaccacgttgtcattaactgcttttattcatccaagtatttaactttttttttcttttttatttgagacagtttggctcttgttgcccaggctggagtgcaatggcactatctccactcactgcatcctctgcctcccaggttcaaacgattctcctgtctcagcttccagagtagctgggattacaggtgtacgccaccacacccagctaattttttgtatttttagtagagtaggggtttaccatgttcatggccaggctggtctcaaacagacctcaggtaatccgcccgccttgggctcccaaagtgctaggatttcaggcgtgagccaccgcgtccagccccattccttttttttttttttttttaatttctccagtgcccagcgtgatccctgacatctggtattagagttcaatacttgggccgggcctcggtaatcccagcacttcgggaggccaaggcaggcagattacctgaggtcagtagtttgagaccagcctggccaacgtagagaaactccatctattaaatatgcaaaaattacatggtcatggtggtgcatttctgtaatcccagctatttgggaggctgaggcaggagaactgcttgaaaccagaaagcacaatgagccaagatcgtgccactgcactccagcctgggagacagaatatgagagactctgtcccaaaaaaaaaaaaggtccggctgtggtgtctcatacctgtaatcccggcacttcgggaggccaaggcctgaggaccttgagccaaggagtttgagaccagcctgggcaatatagggggaccctgactctacaaataagaaaataagctgggatgccaggtgtggtggctcactcctgtaatcccagcactttgggaggccgaggtggacggatcacctgaggtcaggagtttgagaccagcctggccaacctggtgaaacctcatctctactaaaaatacaaaaaaaaattagccaggcatagtggcaggcacctgtaatcctagctacttggtaggctgaggcaggagaatccttgaacctgggaggtggaggttgcggtgagctgagattgggccattgcactccagcctgggggacaagagtgagactttgtctcaaaaaagaaagctggatgtggatgcatatgcctgtggtcccagctactcaggtgtctgaggtgggaggatcccttgtgcctgggaggtcgagggtgcagtgagctgtggtagcactccagctgggtgacagagaaagacccagtatcaaaaaaaaaaagtcttgctatgttgtccaggttagtctgaaaaactggcctcggccgggcacggtgtctcacacttgaaatcccagcaccttcggagtctgaggtgagcgggtcacggggtcaggagatggagaccatcctggctaacacagtgaaaccctgtctctactaaaaatacaaaaagttagccgggcatggtggcaggtgcctgtagtcccagctacctgggaggctgagacaggagaatggtgtgaacctgggaggcagagcttgcagtgagccaagatcatgccactgcactccagcctgggtgacagagtgagactcttgtctcaaagaaaaaaacaaaaaactggcctcaagcaatcctcctgcctccatttcccaatgtgcttgggttacaggtgtgagccaccatgcccaaccactgggaagataattatgtgccaaagtagacaatttcctccctcaacagaccttttgaaaggaaggccgggccaggcatggtggctcatgcctgtaatcccagcactttgggaggccaaggcgggtggatcacctgaggtcaggagttagcaaccagcctgaccaacgtggtgaaactacgtctctactaaaaatacaaaaaattagcctgtaatcccagctactgcggacgtggacattgcagtgagccgagaccgcaccattgcactccagcctgggcaaaagagcaaaatgctgtctcaaaaaaaaaagaaaaaggaaagtgagtcagatgccaagctggtattgcggcatcagcttgtgtagtaagatttgacctggtcagaaaggtctcaaatggctaccctgagaaagaagtggagcttggaagaaaggtaaccaggaaaacccatcatttttctgctggttggaggctctcatggaaacccttaggaaacttacaagctgagaggcgggagtttgcctagaccacactgtgagtttgctgtatatatccacgccttacacagtgaataagaagatactcagggccgggcacagtggctcagacctgtaatcccagcactttgggaggctgaggcgggtggatcacctgagtccaggaattcgagaccagcctgaccaacatggtgaaactccgtctctactaaaaatacaaaaattagccaggcatggtggcatgcgcctgtaatcccagctacttaggaggcttgaggcaggagaatcgcttgaacctgggaggtggaagttgcagtgagccgaaattggccccattgcactccagcccgggtgacagagactccgtctcaaacaaaaaaaaagatacttgccccagcgtggtggctcacgcctgtaatcctaacgctttggaaagctgaggcaggcagatcacctgagatcaggagtttgagaccaccctggacaacatggtgaaaccccgtctctactaaaaatacaaaaattagctgggcgtggtggcacgcccctgtaatccgagctacttgggaggcagaggcaccagaatcacttgaacccgggaggcagaggttgcagtgagcggagattgtgccactgcactccagacttgggtgacagagcaagactccagctcaaaaaaaaaaaacaaaaaacaaaaaactctgcttctcagagttgtggggattagatatgaagtacttagaagagtggttagcacatggtacatgcatgaacagttctgttagtgtgtaaacacccagcagggatttgtctagcttttcaccagtgtatcccagtacctaggctaaagcttggttcagagaaggctcagaagaaatatcacagtaactgtgtgatagaccccttctgatccctttacaaatattctaggctgggcatggtggctcacgcccgtaatcccagcacccaggaggccaatgcaggcagatcgcttgaacccaggtgttcaagaccagcctgtgcaacatggtgaaactctgtctatattaaaaacagaaaaattacccaggcggccgggcatggtggctcatgcctgtaatcccagaactttgggaggccaaggcgggtgaatcacgaggtcaggagtgcgagaccagccttgccaacatgatgaaacccaatttatagaggtggggataagggaccatctttaagagttgcctaccacaagtctataaaatacagtttaaagaccagaaataaaaagaaccccagcatatctactagtatcccagaaatgccctttgcaagccctcttcagttgcacgctctttcctcttcagagggaaccatgattccaattttttttttttttttttgagatgaagttttgctcttgttgcccaggctggagtgcaatgatgcaatctcggctcaccgcaaccctccgcctcccaggttcaagcgattctcctgcctcagcctcccgagtagttgggattacaggcatgtgccaccatgcccggctaattttgtatttttagtagagactgggtttctccatgttggtcaggctggtctcgaactccctacctcaggtgatcctcctgcctcggcctccaaaagtgctgggattacaggcgtgctcagcccatgattccaatttttgtgttcatcaatctctagcacctgtgtccctaaaaacatattgagaaaaagtgagaagcaagcacaaacctaattgtgcaaagaaaggtcgaaattgccactattatgaggcaggctcccaggagaaggcaagttgagcaggctgggttagagtgtggcctcagggtctttgagaacacaagaactatttctgggaaagtcagccaatgcctttctccacctcagaaaatctgtaaaatctataatatctggttcacagtcagatgttcccccttgttcttataatgtgtttttatgtttattgctttttaaaattctttttcagtccaggtacggtggctcatgcctgtaatctcagcactttgggaggccgaggtgggcagatcacttgaggtcaggagttcgagaccaacctggccaacatggtgaaattccatctctactcaaaatacaaaattagccaggcatggtggtgcatgtctgtaatcccagctactcaggaggccgaggcaggaaaatcgcttgaacctgggagatgaaggctgcagtgagccaagatcgtaccattgcaccccagcctgggcaacagagcgagactctgtctcaaaataaataaataaataaaattctatttcagggttaataggtgcagcaaaccaccatggcacacatatacctatgtaacaaacccgcatgttctacacatgtattccatatttttattattttttttttgagatagagtttcgctcttgttacccaggctggagtgcaatggcacaatctcagctcattgcaacctccacctcctaggttcaagtgattctcctgccacagcctgccaagtagctgggaggcaccaccatgcccagctaatttttgtatttttagtagagatggggtttcactatgttgatcaggctgacctcgaactcctgacctcaggtgatctgcccacctcggcctcccaaagtgctgggattacaggtgtgagccaccatgcctggcctgtttttttttttttttttttttttgaagaaataaaaaaaaattctatttcaatcctgctctttctatgaggatgtatttttaaaatcattcttattaaggtataatttacatacaattagaatgtcttttataactgttcctcctctctccaccattcccaggatctaatttagttttacacattacatttgactgttaggtgtctttggtttcttttactccagagcagtctttccaccttaaaaaacaaaacaaaaccaaaacctgtaatttctgcttactagcttttaaaaatttattgagattataatttacataccatgaaattaccttttttgtgtgtgtgtgagatggagtctgtctttgtcactcaggctggagtgcagtggccttgatcttggctcactgcaaccaccccctcctggattcaagtgattctcccacctcagcctcccaagtagctgggattacagacacccacctaatttttgcatttttagtagagacggggtttcactatgttggccaagctggcctcaaactcatgacatcaggtgatccacccatcttggcctcccaaagtgctgggattacaggagtgagccactgcacctggccaaaattaccctttttaagagcacagttcaataattttcagttagttttagagcattccatcaccccagtacaaggccttgtttccatatgtggtcaatcttgcttcaactgcagtcccctcaccacctggcaactgcaaacatgccttctgtctctatagatttgttgtttctggacttttttttttttttttttttttttaagacagggtcttgctctgttacccaggctaaagtgcaatggcacgaacatcattcactaacaccttgacctcctgggctcaagtgatcctcctgcctcagcctcccaagtagctgggaccacagctatgtaccaccacgtctgggtaatttttaagttttttgtagagaagaggtctcatcacgttgcccaggctggtctcgatctctgggctcaagcagtcctcccacgtctgtctctcaaagtgctgggattacaggt

SEQ ID NO: 94618 - DNA, 31451 bp, Homo sapiens
atatgatgaaaacccgtctctactaaaaatacaaaaattagctgggtgtggtggtgtgcgcctgtaatcccagctactcgggaggctgagataggagaatcacttgaacccagtaggtggaggttgcagtgagtcgagattgtgccactgcactccagcctggacgacagaatgagactccatctcaaaaaataaaataaaataaaataaaataaaataaaataaaataaaataaaataaaataaaataaaaaataaacaacagaattttttttctgttggttctggagtctaaaaagtccaagatcaaggtgctggttgattcggttcctggtgatggccctcttcctgattatgacctcatgtggcagagagagatctctcacctgtctctttttacaagggcactaatcccatttatgaaggcatgacataattacctcccagagaccctgcctccaaacaccatcacactggcttagggcttcagcatatgaattttggaggacacaaacattcagtccaggccaggcacggtggctcacgcctgtaatcccagcactttgggaggccgaggtgggaggatcgcttgaggtcaggagttcaagaccaacctggccaacatggtgaaacctcgagaattaaaaatacaaaaactcaggctgggcacagtgcctcacgcatgtaatcccagcattttgggaggccgaggcaggcggatcacaaggtcaagagatcgagaccatcctggccaacatggtgaaaccctgtctctactaaaaatacaaaaattagccgggtgtcgtggtgggtgcctatagtcccagctacttgggaggctgaggcgggagaatctcttgaacccgggaggtggaggttgcagtgagctgagatcgcgccactgcactccagcctggcgacagagcaagagtccatctcaaaaaataaaaataaataaaaataaataataaaaactacctgggcatggtggtgcacacctgtaatctcagctactcaggaggctgaggcaggagaattgcttgaacctgggaggtggaggtcatagtgagctgagatcatgccactgcactccagactgggtgacaaagtgagactccatctcaaaaaaaaaaaaaaaaagagaaacaaacaagccaaaaaacactcagtccatagcagccaccaagtgtgagttgggtctggctgtgggcagtacagaacctgtgtggtggagggaggggacaacgcgagggcaccgaggcagtgacaattcaggagaatgctacatttagggatcctggggagggggaaatagcagacgagaagagagggaggtggaggccatggactgttagaagctgttcagagttgcttgtgtatggcgtgggaagctcctgtgggtatctgagctgtggagtagctgctcaggactgggctttgggaggacagtgctggaagcagcaggtagggcagattgggtgggggagggggcacagacagctggcagggaaataagtttggagatgaccataaatagctctgctgtcaacgcctctcccacaactctctcctcctcctattctctgatttctaataatggctgtgccattcttccagccccagggatggaagtctgagtcactctgactcctcccccggccatgccccatgtcaaaccagctacaattcctgctgattctatctcctctataccatctctggagtcctgcctctcttgggggttccgccagcaccctgtgtcaggcctgtccctagctcaggaactcttgtctcccttccccaggctctatcccaataccctctcaccactgttgccaaatgttactgtctgcctattgcacaccacaaaacgaatgccctggaatgttggctggatgaaatgtgagtccccgcgggattcactcctgtaatgccagcactttgggaggccaaggtgggaggatcacttgagcccaggagttccagaacagcctgggaaacatgctgaaaccctgtctctacaaaaaatgcaaaaattagccaggcatgcacctgtagtcccagctactcgggaagctgaggagggaggattgcttgggcctgggaggtcgaggctgcggtgagctgagattgcaccactgcaccactgcaccactgcactccaacctgggcaaagagtgagaccctgtctcgaaagaaagaaagaaaaagactggtgcggtggcttgtgcctgtaattccagctacttgggagactgaagcaagagaatcacttgaacctcggaggcagaggttgccctgagctgagatcacactgctgcactccagcctgggcaacagagcaagactccatctcaaaaataaaataaaataaaataaaataaaataaaataaaataaaaaagagcctgggcgtggtggctcatgcctgtaatcctagcactttgggaggccgaggtgggctgatcacctgaagtcaggagttcaagaccagcctggccaacatggtgaaacccccatctctactcaaaatacaaaaattagctgggcatggtggtgcgtacctgtaatcccagctacttgagaggctgagacaggagaattgcttgaacctcggaggcagaggttgcagtgagccgagtcccaccattgcataccagcctgggcaacagagcaagactctgtctccaaagaaaaaagaaaaagaaatgtgagtccctgactgctcccagctgtcctgtccggcctccccccagacctcagagctctttgaagaggcagctagatggacgctcctcccccaggctctccaggggcccctgcatccgaggtgcttttctccttgccagatgtttcaagcgtcatctacactcctcttgggacactttctttctttttttttttttaaaatagagattaaggtctcactctgctgaccaagctggtctcaaactcctgagctcaaggagtttgccttgacctcccaaagtgctgggattacaggtgtgagccaccacgcccagcagacatttttctcttgtgcctgggtttatggtgattgtatacatgtgtgtctggctcccagagggtggggacggagtgatacaaatttttgtgcctccacagggaacttgcacgtgacctaaattcaatgacaaattggggtttgattgaaaatgtggaggrgtggaaattttcaattccactgaccccagatgggaggatctgagcccctttcctttaaacaccatctttctctgcagcagctttcagggccaatagttaccatcaccaggaattccagaccagcacaataaataggggctgtggtttctccctctttctccttcaaaaagtaacagaaaaaaaattagccgggcatggttgcatgttcttgttgtccaagctactgaggaggctaaggtgggaggatcacttgagcccgggaggtcgaggcttcagggagccatgatcataccattgcactccagcctgggcaacagagtgagaccctgtctcggaaaaaacaaaaaaacagtaatggaatatgggccaggtatgttgatttgaactggagttttactgcttcccagcagtgtgacattgagcaagtgtggtaacctctacgagccaaatggagctggcatcagctgcctcaccaaacakgatttacgggaaaggctggcgtggagctggggccctgggaggcaggtagttagaatccgtttaaagattttgcctcaattgcctccagctgctgctgtgcttacaaggcacacaagtgctccccctctgatccctcagcaggcaaagaccagactctggaacacacctacagtgctgcctctggccaggcctctgagatatgagtccaacatgcagagaaaggggcaagtccttggtggggggagggggacagcaatttcattaccgccatttcagaggtggcagtatgggtggctgacatacgtaagtctgattgtttggaccagaaggatcttcaggggtccagtcttccagtttacaggtgtggacattgagatccaggcacctgataataccaggttggcaggaaagtcaaatgccagaggcttccatggtctctacttgtgtttggagcaacagaattctgaacagagtcaaagggataaggggtctttctggcacaagctggcccaagaccaggcctttgacagaggcctcagactctggggggcccaaaagcagccctcccttgggctcagccttctggatcccatggccagagtagtagttctgccggctaggacttggtgaggggagctttgaagtcactagttgaaggtcaccttcctggtccagctccacctggcaatgttgactgtgaggtagtggaggggagggctgagaacacagaagagaaaggttgctcctatttggagtgaattagcgtgactgggaaagcagagaagggaaagaggtcaggtttttccaaataaaacccagccctcagctggtgtcttagtttaagaaaacagatgaagagagaaactttgtttgtggcagaatcaattacaactgtcttttgtggccaggtgcagtggctcacacctgtaatcccagtgctttgcgaggccgaggcgggaggatcatttaagcttaggagctggagaccagcctgggcaacatagtgagatccccccatctctatttttaattaaaacaaacaaacaaacccatcttttatatgcaaacaggcaaaaatggaactgtttctactgtggctgtttgactactctagggtctcagaaaacaacaccccaaaatgcaggcctcaggagcagctctctctgaccctctccctccctcctgtctttggcccctcactctcctccgaggccagccatagaaactggaatccttcttcctcaaggcaggtcatagaaaccagagcccttctcccccaaagccagacatcgaacccaaaaatattactctttctcccacacatttctgggtaaaaactggccataaattatctgacctaccttgtttgcttgcaggtcctaagacccctccatcccagagagagtcctgccccgtactcagaaggaaggaatgctgcagagaaaggtcaagaagaatctacacggacaggacttgctgggtttccccactcaggttattggccttctggtccaatcatatttcttttttcgtggttttttttttttttttttgagacggagtctcactctgttgcccaggctggagtgcagtggcatgatctcagctcactgcaatctctgcctctcaggttcaagtgattctcccgcctcagcctcctgagtagctgggattacaggcgcgcgccaccatgcccgaccaatttttgtatttttagtagagacaggggtttcattatgttagccagcctggtctcgaactcctgacttcaagtgatccgcctgcctcgacctcccaaaagttctaggattacaggcgtgagccaccgcgcccggcccaaagtgagatttcaactctctctacaccagctggacctgacagcggactcgcggaggcgcagacgccgccggcggtcttagctcaagaatgaagcagccgcactgggctaatgcgcctttgggttcagcccggcaggcgagggaagcaagagttcgctcagattggcttttgggtttaagctaaagcgtcagaaactgacatccaggtttacatggggcatcctggagagggtcagcctcgcaagcggctctgctaatcccccagccctgatcccgctcgcgggtcccggtgggtctcacgcctgtagctcctgcggagctgggctttcagcggcgcccagagaagcaccagccgggcctggccgccgggtcccggctcccgcgggacgctggaggcgtcggcggccctggccccgcctcctccccggcaaggcccaatggggcggcaggcccggcagccccgccccggtggtgcccgcgcggccagcgcccgccaggcccagcgttagcccgcggccaggcagccgggaggagcggcgcgcgctcggacctctcccgccctgctcgttcgctctccagcttgggatggccggctacctgcgggtcgtgcgctcgctctgcagagcctcaggctcgcggccggcctgggcgccggcggccctgacagcccccacctcgcaagagcagccgcggcgccactgtgagtgccgcgcggagggtccaggcaggcgcgcgcccccagctgcgacgtggcggcttcccaggctggggccgggaagcacgtcccgccagcccgcagcccggggacggcggggtcaggcgcacaaagggccgcggggcagcttcgctccgcgctcccccgcccggcgcttcccggccgtgccaggcgctggggtggggacttgagggacggtggcaactggtggcccgggcgacggccagctctgcgcgggcgggggctcggggctgccgcgcgcccctaggtatttcgggagggggtcctgagagtgtcccggacccgaagggtggcctgcccgccctgcgcccctggaacgagacgagcacccgtggggggctggagcaccccgcgcgctcccctggcgagagggagggtcgtggctcggcccctgctcagacaaaggctgggaggcgggagacatgcacttccccttccttttcagccaggcgcgcgctgataccaggcccacgtcagctatttttggagccttttacacgacagctggaggagcgtcctttttaattttccccttttgtttggccgcccccacccccaccccttcgccttcatcgctgcacttgaggctccatcctggggcctctccttgacttgacctgccttggcaggcacatgccctccctgcctggctcactcgccgcagagacctggcagcccgcgcaaaatgtcactttgcggaatcgttcccacggcttctgggtacccttagttccctgcttaggagggaagacagtagtcgggtcgtaataagcaagacttagcccgagcctccgttgccaacgcaggctgccttgcttggcgtgtgggcatcggcctgccccctcaccctggctacccaacacagctacaaaaggcagggaacaatgtaggtcccttggccctgcctaatgcctgttgccatggaaacccctatcctaatctggccaggagccccttgcagtgagccaggagagtgaggaagaggggatggggcccgctggccctgacctggccagaggaggtaatggttaaccggattgtgggagcagctgactagagccgggggggtagggaggcttgggccccagtcctaccttccctgccaaggagaaaggggcatgtctgcttttgtacctctgggaatctacctcagggatctgcccaacaactcccaggttccaagtgccccaggacccaaagattcccatatagcacaccaccttcagcaaaaatatggtggaagttagccacattctttaattctccctttttttctgccttgatggtaaaaaaaaaaaaaagaaacaaacaacccgaaaaacacacacaaacaggaacacaaagcgccttttaagggtcctgaatttggatacagaaaaagcagtcagttgcaggcccttctagaagtccccatgtgggttggttatgaatggggaaattgcttggtgttggagttggacatcagactctacagttgcgactctgccagcttgttacctggcaacgcagctggagacagaatacttggcattccccttgatgacaaggaaagaatattttggggctaaaagagccccgtgtctttgctgcctggtaattcctgcacgcatcttttcctattttgcaacgccataggcttccagcgactgctggtgatgtttctggtaagttagagcttggggcagtgcggaccagttctgtgaacggctcagtggcagaattacttatctagccttccttcactcctaacccagaaacttcttaattcttgccccttaagtgtgcagatctttctgccacgtcagataaggccctagctgccctgccagagctgattggggtggttgtgtttaggcctagtaggtactgaggaaaagcctctttggaatggctgaggcctgctcccacatcttctgtgtgaagttgagggcccttgggctggttccattcagggtatgaggtgctggaaactgctctcagattactggaagccagggtctgtggccttccctggggtttatactctgtaaacccatgttaaaaataccagcagattgcaaatattagtacactgtaggttgtaagcttcttcagggcatggggcctattgctggagagagatgccacccgtgtacatctggtgcaggctgctggtaagaactcactggcccctgtgtggcaatgcataccagatgggtgagaggggaggaaacacattcagtgaaacagaaggtgagggcagggcagccctgaccacagatggagttgacttcaacttgacctttatttatgtctttgacaaaagtagtatactcctactttgtgccagacaccatgccgggtgctggggatagagctgggaataaaaccagcagagactctttcaaaacccttaggagctcaaattctgatgtgggagggggcagacagtaagcaagatagatgttgactagtatgatatatgggtacaagagctaaggaaggccaggcactgtggcttacacctgtaatcccagaattttggggggctgaggtgggaggattgcttgaggctgggagctccagaccagcctgggcaatatagtgagaccccatctctacaaaaataaaaaataaaattagccmggcacgatggtgcatgtctgtggtcttagctactcaggaggatcatttgagcccaggaggtcaaggctgcagtgaggtacaattgtgccactgcactctagcctgggtgacaaagcaagaccctgcctcccccttctccccccaaaaagagaagagctaaggagaaacaggcaagaaaggtgtgtgcacaaaagtttgtatagggcagccagaaaagtcctcactgaaggaatcgctgaggaggggaggaagcaggccattttcggtattgggggaagagggactcgcaggtgccaagggcatgatggaagagcagagaggatggtgcgaaggctggctcagcaggcaccaggtggagtgacaggatgaggttcggcagtggggtctgtagagggctcacaggccatttttgagagctttcgcttttactttgcagggttttgagaggagtatcgttacctgatttccatcttatcgggagcattctagcttcagggacctggcaagagaggatgatggcttggacctgggtggtggcgctggggatggtgaagaagtggttggattctggatatattttgaaggaggagccagtagtggggaaaggttccaattcaggcgattttacataaaaatctagatacgcagcaggcactcacttatggcaagggtgggcttgtctgagggtggcttctggttttggtggtttggatgtgagagaagggaaggaatgaaggatgacaccaaggagtctactagagtttgttccaaaatggctgttctggccgcgtgcggtggctcccaggactttgggaggccgaagcaggcggatcagttggggccaggagttcgagacctgcctggccaccatggtgaaacccggtctctactaaaaatacaaaaattagctgggtgtggtggcaggcgcctgtagtcccagctactcaggggctgaggcaggagaattgcctgaacccaggaggtggagcttgcagtgagccgagatcacgccactgccctccagtgtaggcgacagagtgagactctgtctcamtacatacatacatacatacatacatacahgcatgcatacatacatacatgcatgcatacatacatacatacatacataaaatatacaaagttgctgtcctgccttcttgagcccccaggaattggaacctttccccactctctgatcttttgctgggacatgctgactgagcagcctttctgctgagagcatgggtaggaatgtggagggagcagttatgcctggggctggctgcctgcggctggacctctagcctcctgctgggagcagcaagaagccagggatgtgttttgaaatccttacttggtattgggtgctaggagccccagacagggaggagagtcagcctaacgtgcctctggtgactggtgtaattccatcctgcactctcgccaagaggacagtgtttgtgcaatgcatcagctgaagattcgtggtggctgtcacttcggaggttttcagggaggcctagctgctgctctgtgtatttcaggtagcttgtcaccacttatctctcagagaagggcagaccatggctgtatctccaccatacaggctgaacagcagacaggggtctcaaactccagtgccctgggccacactggagggcacttggctgtcatggagtgaagggagaggccgccttcagcccagcccatccttgccatgagtgagtgcctgctgcatttctagatttttatataaaatctcctgattttttttgactggtttaaatttttattattttggtaaaaaacgtataaaacttaccatcttagtcattgttcagtgtacagtattgttaagtacattcrcactgttgtgcagacattaccaccatccatcaccagaactttgtcaccttgcaaaaccgaaactctctacccatgaaacaatacctccccacttcccgtccccagtccctggcagccacctttttactttctgtttctatgaatttgactattctaggtacctcatgtaagtagaagcatatagtatttgtcttttgtgactggtttatttcacttagttagcataatgccccccaggttcatccactttgtagcaggtgtcagaatttcccttcttttcaaggctgaatcatattccattgtatgtagataacagtagtcccccttatccttggaggatgcatttcaagacccccagtggatacctgaaactgcaaagcctgtagatactatgtttttttcctatacatacagatctatgataaagtttaatttatgaattaggaacagtaagagattagcaataataactagtaataaaatagaacaattataacaatatactgtaatgaaagttacatgaatgtgatctcttaaaatatcttactgtactgtactcacctattttcagactatggttgactgtgggtaactgacaccacaggtaactgacgtcatggaaataaaacctttgataaggggggactgtatcacattgtctttatccattcatctgtgatggacacgtgggttgcttctatcttttgctgttgtgaacattgctgctatgaatgtgggcatacatatatctctttcagaccccgctttcgatatttttggatgtatatacagaagcagaattgctggatcatatagtaattcttgtccttttcttttctttttttttttcgagacggagtcttgctctctttcgcccatgctggagtgcagtggcgcgatctcagctcactgcaagctccgcctcccgggttcatgccattctcctgcctcagcctccccagtagctgggactacaggcgcctgccaccacgcctggctaattttttgtatttttagtagagtcagggtttcactgtgttagccaggatggtctcsatcttctgacctcgtgatccacccgcctcagccttccacagtgctgggattacaggtgcgagccacygtgcccggcagtaattcttttccttttagctaaggaacacccatactgttttccacagcagctgcaccatttcacattcccaccaacagggcacaagagttccaatttctccacatccttgctagcactttattttctgttttgttttktttttcctgatagtagctctcttagtggttgtgaggggatagtggggtgatatctcattatggttttgatttgcatttccctgatgattagtgatgttgagcatcttttcatgtgcttgttggccatttgtatatcatctttggacttgaaatgtctatttaagtcttttgtccattatatttatttatttwttttgagatggagtcttcctgttacccaggctggagtgcagtggcatgatctctgctcactgcaacctccacctcctgggttcaagcaattctcctgcctcagcctcccaaatagctgggactacaggtgtgtgtcaccacaccaggctaattttttttctatttttagtagacacagagtttcaccattgtggccaggctggtctcgaactcctgacctcaagtgatctgccctcttcagcctyccaaagtgctgggattacaggcatgagccacggtgcccagccagtcttctgtccattttaacgttgagttatttgttttattgttgagatttactgatttttaaaacttggtcaccaattaagatttttttaaaaaaccagtacctggaacaagcagaacaagtctctgctggccttggctcatgttgctgttctcagttcccctgggatgtttgcttccagggaggcctgggcactcctgactttggtgacagccctgcttgctctctctctgttacctgtaggtttccccttccacattcactgcctccgggcaggcactgttgtgttttaggcatttcagtatcccagtggggtactggataagtgcttagttagcacctgccggtgagtaaataatcaggtcctgtggtctctgagggtttgacacatcaggtctttgatcttgaccttgaactctcctagccatgcctgcctgaagcccaaccgtggagcccaggctgaggctgaaacctgcagaactggccccaagtgagtctctccttagggctcctgattatgatagttcattttttttttttttttttaacaaatttgattagctgtcctcaaattaactcataggagatgctccccagaactaaactagctctgcaacagctcaacagactttccgcaggttctgcagctctttccactcaagcttcagaraaaagtgaaggaatattgtagattgggttcaaaatccccatcgcgtcttgggaaaggcagtagagccagcagccagccaccttttgttctctagggaatggaatagtccaaggctgtgtttgtgttctgcttctctacatctgacccacgggtcttccagaggctgcatttgggtcagggacctgggytctatcttgcctctgatgcagaccacactctctkagtctcattattccccctaaatgatctctaagattatttttagatttaaaaaaaaaaacaaactctttgcatatctttggaaagtcagttgtttgaggtctgttaggctttaatcacttttgttttaaatgtgccgaggtggtttctaggcctgcttttcacaggtrttctgtcccttgtcagttcttcccacccagttytttttgtttgtttgtttgtttkttttgagatggagtctcgttctgttgcccaggctggagtgcagtgccgtgatcttggcttactgcaacctccacctcccgggttcaagcgattctcctgcctcagcctcctcggtagctgggattataggcacgtgccaccacgcctaatttttctatttttagtagagatggggtttcaccatgttggccaggctggtcttgaactccttaccttgagtgatccacctgcctcagcctcccaaagtgctaggattacaggcatgagccattacacccagccccaacccagtgttttcaaataaacattctcttcccttcacctgatttgctgtgtctaatctagagtggagctgaagacacatcaccacctctctaaggactgtgtgtaacacaagagtaattgggctgtaagtgaggctgaggagtgctgctttgaggaaagggcacagctctcagctgagctggtgagatttccctgtgactgaagttttattagatcttgttccctgctctgcatttgctgcttcttcccaggctgtgggcagaggagcaggctggtgccccggtgcccctatctgctgcaggctgaggttcaacaagccttgtccaaggcagctgtactgattcattgttaggtggccagttcctgagttttctttgaaattcacttcccagactgttgggtwttcctgcgagtcagactctccttcagtagcgtcccctgccccctaccctccactggtctccctggacctctgatcagcccctcattgagtcctttgatgcttctctggtaggactgacccacctgcrtcggctgggatcaagggttctgagttccattcgcaggtgctgtaagcctgtccttcctgttgaatagggtcagagtcctcgtgactctgctgttttcaagctctgtaaccttgggcagtaagctgttaacctctctgagcctcagtttcccacacttaaaatggagataatggccaggcgtggtggctcacgcctgtaatcccagcactttgggaggccaaagtgggtggatcacctgaggctaggagttcgagaccagcctggccaacatggcaaaaccccgtctctactaaaaatacaaaaattagccgggcctggtggcgtgtgcctgtaatcccagctactcaggaagctgagacagcagaatcgcttgaacccgggaggcagaggttgcagtgagccgagatcacgccattgcattccagcctgggtgacagaccaaagactctgtctcaaaaaataaataaataaataaatwaattaatattaattaaataaaatggaggtaatgatacctccttggggttgtttttgggattaaatggaatcacattgtacagcaytggtacactgtaaggcacatagtaggcactcaatacctatctatactatttcctttatcaccacaagttagttgagggctcttgggtcgcacgcaacagacaaagttagtgactggttaacttggagaggattttattatgagctacacagcgtagctcatagaattgcagggaaaactataaagaactaagtcttggacaaaagtaatatcttggcatgggcctgtagccccagctrctaaggaggctgaggtgcaaggattgcttgagccccggagtctgagcctggcttgggcaacagagagagataaagagaccctgactctaaacaataagtaaatacataaaagaggacccaggccctccttaggaactggatggcaggagcccctggacaacctcttactgatttggtgctggatgaggcagccgcagctagccagtgttctttgtgttgatctcctctgccttcatattccagggggagagggtctgacaggccagactggcccccaccctcttggccactggtgggctgggcatgtttttgggtagttctacctagccagattaaagtgggggtggggtggggagtccagccagcctgggcaacagggcaagactccatctctacaaaaaaattttaaaattaggctggcacggtggctcacgcctgtaatcccagcactttgcgggggtcaaggcaggtggatcacttgaggtcaggagtttgagaccagcctggccaacatggtgaaaccctgtctctactaaaaatacaaaaaattagccaggtgttgtggtgcacacctgaaatccccgctacttgggaggctgaggcccgagaatcacttgaactcgggaggcggaggttgcagtgggctgagatcatgccactgcactcccaccctgggggacaatagcgaaacttcgtctcagaaaaaaaaaaaattaaaaatagctgggtgtggtggcatgcgcctgtagtcccagctacttgggaggctgaggtcagaggatcacttgaagccaggaagtcaatgctgcagtaagctatgatggcatcagtgcattccagcctgaccaatggaacaggaccctgccaagaaagagagagagaaagggaggaaggaasgaaaggaaggaaggaaggaaagaaaggaaaggaaggaaagaaaggaaaggaagtaagtaaggatggatggatccaggtgctctaaaccagcagttcccaaagtttttggcaccaggggccagtttcatggaagacaatttttccacgggtggcagggtggtgggcagcggggatggttttgggatgagtcaagtgcattacatttattgtgcactttatttctattattattacattgtaatatataatgaaaaaattatatagctcaccataatgtacaatcggggggtcctgagcttgctttcctgcaactagacagtcccatctggaggtgctggaagacagtgacagatcatcaggcattagattctcataaggagtatgcaacctagatccctcgtgtgcgcagttcccaggcatgagctcaggtggtagtagtgctcactcacctgcagctctcctcctgctgtgtggcccagttcccaacagtccgtggacctgcactaaaggctgtggcctggtctgctgacctctctccagagcccacggtactagtccatggcctgggagttggggacccctgctctaagcagtgagggagctgatttgcagacgggggagtggacaccgggcagctggagccctggctttctgccactgtctcctggtgaagggcgggcctggcygggaggagagggcccccctccagcctccccaggggcatgatgcgctgtgtgtccctgcttctagatgccgacaaaaggatcaaggtggcgaagcccgtggtggagatggatggtgatgagatgacccgtattatctggcagttcatcaaggagaaggtagtgccccctcctgaagtgggtggctctccaggtgggctggccagggattgttctgtcccacagggtcttctggactgcaggtccctaggacccccccgttgtcctggtaggcagcagcagctctgtttctctccctctgtctacccttctttcacatctggtccactaattgttcagaagtcrtcaggcgggggcctgtccccagcagtccgtgttgtgatggtgccagatcccacacgttctgtcaactttgagaagcttcaaggttaatcctgtatcatttccatcttgatcccctacgttttgcctcacttcttgaaaaggagtgaaaagggaacagggctggtgtgtagggcagtgacccagcctgcagttgtgacgagccaccatggcaaaggggtcccagagtggccgcttggcttctccaaagttgcygtggtctatgtatgtccaggagagcatgtagtccttgtgaaggccccacactgtgtgtgcgttcatgggacaaaggttgagaactgtcacttccaactgtaagatctcaaagcacttgagaagaggaaaccagttgtatagagaaatctagatgtacttggggttggggtttggctgagttgatgggccatgtgaggggggcacacaggcacagtggaggaagaaccctccaaaagactgcggcctggcctgccaacctctctccaaagccccagcctctgccagctctggccaggccccactgagaaatggctgactccagctttctgctgcgcccctccactggccttcactcatccctgttttgactgactgtcccctgccatggcctgcagacttcttatcctgccctttgttgtcatgtccctgagtcactggggtgacgccttgctctggccctctgtccccagctcatcctgccccacgtggacatccagctaaagtattttgacctcgggctcccaaaccgtgaccagactgatgaccaggtcaccattgactctgcactggccacccagaagtacagtgtggctgtcaagtgtgccaccatcacccctgatgaggcccgtgtggaaggtgcgagggtgtggaggtgggcgggccagggagggtcacaggcttctcccaccggcctctccagacttggggtggggcagttggccatgtcactcatctcgggactgggaggttgggaggctccagagctggggctttcctgaggccaactgcacctgaggccagtctccctgtgtgtgcctggtggacagtggggcctcagaggtcacctttgatgaggctggggcaggcgtgggtaaggggctggcctcaggttccacggttagggcacagcagagctgagaacagaatccatgtcttccatctcccaggccagtggtgtttctgcttcactctggctctgacagtggtaggtgtcatcggtgacagggctgaggaggaggaggaggaaggtaatgctgatgtggtcacagtaaggatggcttctttgggcagtagtccattctggcgtggacagtcttgcaggcaggtatgcagagagattgtgcagaggagtgctgtgtgtaaggcctgtgtccttcagagcctcagcagcctctggggaacattgctgttgccctcctgccactggcttggccttgcaggtctgcctctgtccccatggtcatgcagggtcactgagaggtgcccccaccaggcctagactggcttctggtccttggctgttggggccgctctcgagggttccatgaagtcacagcagtgtgtgtgcagaggggccaggtttggataattcgagaaaggatggttgaggagttttctgagctctctcttcctactttccacagttggagggagctggcggaaagtactcgagatacatctgcaaattccccaggcctgcccctgtcctgcaggtcatgcctgacccacagcactgggatcatttgagtgttgagctcttcatttcacctgaaccttgggagttgtgtatccccatttatggacaaggcaggagagggtcacagccttaggaactggggtggcgttggggccaggaccggagcatgtggagtgggcagtgtgttgtcaggcttcgtcagacaagtccttcccccggactgtactccctccatgtgtgatgtgggaatcataatggccaacagagcacttagcatggaccgggcaccgttctaggccctttacacacgagctcatttcgtcctcacgacaacacttaggctggttatttttccagtaatttttttttacagctttggttgagccacttttgtaagcctcaccattaaaactggcagacttgctgggcatggtggctcacacctgtaatcccagcactttgggaagccgaggcgggtggatcacctgaggttgggaggtcgagaccagcctgaccaacatggagaaaccccatctctcctaaaaatacaaaattagcttggtgtggtgtcacatgcctgtaattccagctgctcgggaggctgaggcaggagaaccgcttgaacccaggaggcagaggttgtggtgagccgagatcgcgccattgcactccagcctgggcaataggagcaaaactctgtctcaaaaaaaaaaaaaaaaaaaaaaaaattggcagactccagagcccacacatttgcactctagactctactgccttcctcatgaagaattttaggacccccgtctggctgtgttgttgcttggggttcaaattctggttgaaagatggcggctgcagtgggaccactattatctctgtcctcacagagttcaagctgaagaagatgtggaaaagtcccaatggaactatccggaacatcctgggggggactgtcttccgggagcccatcatctgcaaaaacatcccacgcctagtccctggctggaccaagcccatcaccattggcaggcacgcccatggcgaccaggtaggccagggtggagaggggatccactgacctgggcaccccccgactggagctcctcgcctagccatcctcttgtctctgcagtacaaggccacagactttgtggcagaccgggccggcactttcaaaatggtcttcaccccaaaagatggcagtggtgtcaaggagtgggaagtgtacaacttccccgcaggcggygtgggcatgggcatgtacaacaccgacgaggtgaggctggcttgggcatcctgggcccctcctctcccagcttgtctcttcatctctgtctcgtggctttcctttcttctgtaatggcctcattcttaggccacaaagaggcagaaatggccaccagggctgggcatggtggctgacacttgtaatcccggcattttgggaggccaaggcaggattgcttgagaccagaagtttgagaccagcctgggcaacagtgagaccccatctcttgaaacaaaaagaaaagaaaagaaaagaaaagaaatggccacgagcagctccaggcgtactcctgcctgcttggctaccctatcagaagagaatgcctctttatccccagttccagctccaatgccaggctgagtcacatgaccacctctgagccaatcacagaggccctggggagaaaggcttctgattggataagccagggacacactgtcaaccccagcgctaggcctgggaattagccctgccccagccacatgtagtctaaggcggtgctttccaaaaaaaagttgtttccaaaaaaaaaaaaaaaaaggcggtgttttccaaaaaaaaaaaaaaggcggtgttttacaaagcaaagttgagagggagaggctgggccagcagaaacatcgtgtgcactgcacggaggctggtgttaaacagtcgcgtgggcggcggggtaccgttcctggagakctgggccttgccstgggaggtgggaggttgccrgcaatcgccaggctagggcaccacgccagggccctgtctctccccctgcagtccatctcaggttttgcgcacagctgcttccagtatgccatccagaagaaatggccgctgtacatgagcaccaagaacaccatactgaaagcctacgatgggcgtttcaaggacatcttccaggagatctttgacaagtaaagcctcatccatgtactctgtggcctttcttcccttccccccatgctgttcccatcctaccctgggaaggtcgctattagagtgcatttggctcagctccgaggctcagggagggatccccaacctgtcagccttctgccctctccccataacagacctttttactcccaggcactataagaccgacttcgacaagaataagatctggtatgagcaccggctcattgatgacatggtggctcaggtcctcaagtcttcgggtggctttgtgtgggcctgcaagaactatgacggagatgtgcagtcagacatcctggcccagggtacgctgggaggacgctgctccctgtgggggtggactgttggtcttctctggctggagggattttcagacccttttggtagaaaactctagtggagcaggactcattgcagggtcctctgtggacagcagggggcaggagctccctggcatctgagtgagagaggatcacaaattaggtttggactggtgtatgactgaggctgctcttagagagaaaggagggcacaggaattccagggctaggttgacagccctaaggttgctccagtccatgatggagcctcatgactctttggttccagtaggaaaatgggatcaagcgggactggaggttctttaaactacagcgaatgcattttgcatagtgaacctaatggatggaagagaatgttggggaagcctgcaaacccccaagccctagggtgtcctaaaagacaaatcagattgcagtaaaaagtataggtgatgaggtcaggagtttgagaccagcgtggccaacatgacgaaaccccgtctctactaaaaatgcaaaaaaatttagctgggcatggaggcgggcacagtcatggacacctgtaatcccagctacttgagaggctgaggcaggagaatctcttgaacccaggaggtggaggttgcagtgagccgagattgcgccattgcactccagcctgggcaacaagggtgaaactccgtctccaaaaaaaataaaaaataaaaaataaagtataggtgagaccattagagaagaacagcgagaaatgggccaattgtgttgggaacaagagcaggaaaggtggtaggtgtgggaaacaggcaggacatagagagtgaaagagaaacctaagcttaccagggcagctcctggtatggggaaaagggaagcccaggacgggttctgatgaaaagcagagtcttgttactttgtgtaaacctttggctttactttggaaagttcagtggggatcctctcaccgaacaattcccatctaggatagaaggatgaaacgccatagcagatgaggcagaggcatgaaaatgaaccttaagtgtctaaggaatggtgtgaaggtgcaggtaaaatggagaagggattgcttacagccaaaattcttagaattcatagacaaagcattttcctgtagatgttgtccatgttttctttcttcaatccttattttggtgtcatgggggtgcctttgaagccctggagtccttgacaatagaaaagcttgctggagttgacatgtggatttgggagcattcagaaattaatcaaaaagcttgaaagtggcctaagagagtagctgcaaaagtgattgttgggaaatagctgaccacagctttattgttttccttgaatgtgcctccgggtcacgagccaggctgggtggcaggctgtgggggaccacaggactctgtggcctcttgggccctgtgggcsacaggctgtggggcgcctggagctggtgacacagatggatgttaatgtgctggtgatagccaccctccagtgccctccagccctgtgctgggccctggagacccacaggagggtgaagagrcctggaacagtccctgtcctcccagttgcagctgggggaggctgagtagagccacgaactatggcagctacaatattgggttgtagagggcagcagggctcagctgggtggccccaggagaggcgaggccctgagagaaaggctttctaccctccaggctttggctcccttggcctgatgacrtcyrtcctggtctgccctgatgggaagacgattgaggctgaggccgctcatgggacygtcacccgccactatcgggagcaccagaaggtgagtgcagggcatggggcctcacaatgcccctctaccccaggggcctaaagcccactgggctgagggctggaaggacgagcctgacccaccagcccaggggcgggcagctgtatctgggcagcctcctcactagctggctcggctcttgatctccctgcaacccccgtccccagggccggcccaccagcaccaaccccatcgccagcatctttgcctggacacgtggcctggagcaccgggggaagctggatgggaaccaagacctcatcaggtgagcatggagggagaggccggagctgcccaggacaggctctgggtcctgcccttgcacagatggggtctcattctgccccatccccataggtttgcccagatgctggagaaggtgtgcgtggagacggtggagagtggagccatgaccaaggacctggcgggctgcattcacggcctcagcaagtgcgtggcctggggtggtaggcagaccctggggccatgtgggaggaagccaggggacccctcctaaagtccccctcatgagtcagcttagctgcaagggggcctggggcaggacatgtccacagccctgagagactgctcaggccagcctctgtagaccaggtctagtgagttcctccccatccctgaggctggctactcagagctccttccgaccctgcccacacccctttcccagcttctctcaggagagcagttacctggcaagacagaccctgcgggtgcctgccgaatctcggtggcctcatggtagggggctatagctggcctctggcctgtagtctgggtggcaggagatggctgttctgatgcccaagctcaggctgttccctggaagggcctggctgatggccttggcaaggcctggagccrcccctgatgtgagtggtgctctctctgcagtgtgaagctgaacgagcacttcctgaacaccacggacttcctcgacaccatcaagagcaacctggacagagccctgggcaggcagtagggggaggcgccacccatggctgcagtggaggggccagggctgagccggcgggtcctcctgagcgcggcagagggtgagcctcacagcccctctctggaggcctttctaggggatgtttttttataagccagatgtttttaaaagcatatgtgtgttycccctcatggtgacgtgaggcaggagcagtgcgttttacctcagccagtcagtatgttttgcatactgtaatttatattgcccttggaacacatggtgccatatttagctactaaaaagctcttcacaaaattgtctgctgtgtttgtccctgaggggaggaggtagtgggaccctgaggcagaggccctgctagagctggcaggttcccctggggcagaccagagcacctcaggaaggggctgccacggcagggaagggaccaggcagccctgggagcccgcattccacaggggcccactgcggagttctcggacactcagggcacaggcctgtgggttccctggaattttctagcatgatccagtttctgtgtccagttctccattctgagagtcaatcagttcctgataggttgtcattgatttttttcttcgttggttttaaccttctaaacatctccaggccactttcttagcctttttctaggtactaaaaagaggtcctacccacacctgcctcacacttctcctttccaaggctgcctgagtttggaggggcttgggtgtgtgtgaacaagggccctgcattgtctaggcctgcagttcccaggcttgggttcactttcaccatgcattggcaaaactagaaaagtaagcttgtgacaaattgttytcggccgggcacagtggcgcacgcctataatccctgtactttgggaggctgaggtgggtggatcacttgaggccakgagttcgagaccagcctggccaacatggtgaaaccccatctctactcaaaatacaaaaattagccaggcgtggtgatgcgcacctgcagtcccagctactcgggaggctgaggcaggaaratggcttgracctgggaggcagaggttgcagtgagccgagactgcaccactgcactccagcctgggtgacagagcaagactctgtctcaaaaaaaaaaaaaaaaaaaaaaaaaaaaaaaattgctctatgcaagttttttagccccatgtaaaaaggaaaaataaaagttgctctaaagctacatataatcaaaaggactgtcctctgcatagtaagttctgcaaagcttcttctttttggtgttaaaatgtcctggagaagagttgtataatctttataaagtcctggccaggtgtggtggctcatgcctatagtcccagcactttgggaggccaaggtgggaggatcacttgagcccgggagtttgaggctgtagtgagctatgactgcaccactgtactccagcctgagtaacagagtgagaccccatctctcaaaaccccatcttacaaagtccctttcctaaatactggggggactcctatggctcctgaaacccgaccattgcggtagactgagtggctttggaagggctctagccctccatccacactggtgaccccccgcttgcttttcctgagtaatgccctgaaactctcagggctataagaagaaacgtggactgctggctctagcaggcccagcccctgggaggaagctcaaggcttcctgcctcttcttgcctgtcaccagcacggggctggcagctctgcagaacgcagcctctgaagcccagcctggcatcgggagctggcttctttcctgaagccatgtgggtgggtagggaggggaagcagcttttctctgcaagtggtgggaatacaggggccgtggcccacaccactctcttgggcccggggcagctggctataggcgcctggccctgcagggggccattccagtgcagaggatggtctcagcctcccccgggccctgggagagtgcagccctgctgtgtggggctgggaagttttgctgggagttcctgctgggagtgagggccaggtccccaagagctggggaaagaagcatttgcagtcacctcactaaagaatattcatttatttataattattgctaagtaaacttctcttttaaacaggaacataaaaacacagtagggctttgcacaagtggaatctctaaacagttggtttgtatacatgtcaaaataagttagaatggaatttgtccaggagtttccaagtcacccgagaggctgtgcacctcttttgagaaggttagggaggggtacagacaggagccttgccaagaccaccccccagctcaaactgtgagttgtgctgtttcctcctcctagctttgcccaggtccaaggcacagggcagggggcgttcaagtatcgaacctcacagagggccagtgctgacggcggggctgggggagggaaaggagagccccaccctgggggccagaccttctcccttcagtttccaagaccaaggccactgcactggcaggagggaggaggaggaggagaggtacagggttctttttggtaccaggggagaaagacgtgggaagaggtagttgcaggggatgatgccttctgctcagcaggagaaaatgtcttatacagtgacggggtcactgccacctgagggtcatcatggcgggcacctgggaggtcgtggggcttcggggtctggaagccatacttgggccaccttgtccacccctcagtcctgatcacagtcaccctgaggcctggcttggtccttcacttaaggatccagccttgggggtggctgcgctgcagattggttcctcccaccgcaggctgttcccttctccgggtttctaggctgaagctagtggcttcatctgtgcctttggggaagacccctgcttgcccctccccactgaggcctcaggaggcaagtgggtgggggggtccgggtgccctagagttcctgaatgtgctattcactgccctgggcctgtcatctctggttccaggggcaggagctggcgtgggaacagaggggaagagagcaggcgagcgagggagctagctgttggctgagcagagtcagcagccctgacagccgaggatgggacatgggacagagcaagtcagcgactgcaggagccaggcaggggtggagggcttcccagctctgccttctcctgcctcccaccccagcctgctgaggctgctgccagcggctgcacctccagggccagggtgacagtccccatggagccccagtcctgcccggccaggctgctcggggtgggtgggtaggaagcacgcacagcacattaggaagcttacgcttggaaaaagaaaatgcatctccatcagaaaaggtcataggtgacacacagttggaaagaaaaaaataataagttaccttcagaagaccccctttgctcaaaaaaacccttgatttccctctgtgggctttactttcctttttaaaatacgttgctctttccgggaagctgctgactcgtggctatccccgtcgcaaggtggacactgaggaatgagaaatgactgcggtccccctccccgacaggtggtcctgggcctcccccaaggacagcccttcttggtcccctgtgatgccctcactccgccctgccctgccccatgcttctggttttgttagtgtgtgcctgacgcggggcctgtcctggctttgttcctagtggggccccctggtgaggcactccagctagggtcgaagtggacgacatgtgttgcaatccactgtagggacactcacttccagaaagggatgtaggacaggggtcttctgggggctgggtgccccccagctgtcctgcaggccagggccagggccacgtgcacacctggcttgaggagcgcatgggagaccccgggaggtagaaggcagagtgccctgcctggcggtccgtcgacagggcggggaaggggccctggacaaggtagaggtgggcagtactggccagaggggagctcagacatccttagaggcaggagttggccgtgaaaaagacatggctcaagtggtctcttcttccagtgtcaggacccctgaagagctctgctgggcctggagagaccccgagggccggtgcccttgtgacctgtccccagtggccccacttctcccactccccacggaagcaggccagggagacccagatctgggcctcgcgtgttctccttcccttgctgggatgcctgggcctgtgctggctcacagccggggccagtagtacagtctccatttggtctaaaggtccctagtggtgcaaatgactcggggagggagggctcagaacagtggggcagtagcttgtttctcggctgcaggaggtgcagcctgcagcccatgggtctcacccccatgccctcgcccccggcccccgttaggggtggcccagcttgcgctatagcacrttgtagtaggccatctctttcatggcctgttcagtgaggacactggcctcggcgctgctgtccacgctcgcatagctgtaggcgttctcctcgaagtcctccatctcctgctggccgtcgagctctgaagggtcagtgcctgtcagctccatcatggggtctgtaagagaggggcacagtcagacctggctgccatctctcgggaggagccagtcacccccacgcaggaagctgatggcctttctaaagagagggcttcccagtcacggcctccaggagtctcagctgcctctcagccttcccaccctcggacgcctcagggtcctgtggcttctagctgggtgaccagacctaggccccaaagctgagtgtgggggagtgggtgctatcagtgagggcctttgtggtggagaactgcaggcctggccttgaagccttctttgggtcattcttccattgacccgtcaaagtcactaagccctacttatcccttctctgcaatgtttctctggccacgggaagctgcctgcgtgacatcacctttgcagcactcattagcacctgctgcatgccagccacttcgcaggcctcgcctcatccagcaatcacaacagccccatttagcagctcagaaggctgaggtttagagaggtgaatcaacttgccaaaggtcacccagcacatgctgttgttctgagccactgtgctgctctgcctcacactgcgggagggtgaggcctcctgccggcagctgtgcttttctgttggttctagccattggtatccttgggcctggctctccagggacaaacactcagggtaggttcataaagatatgtcaggcaaaaactcctaagaggccccttgtaattttataaaattgaaatctcattataaagctcttacaggggaagcccagggtaggatctgggggaactgggaggctggcaggggctgtggctggcccccaaagtgcattctggccctgtccgctgagatgtgcgtgttttgggggaaacagaccccaggctgggggcagccctgacaggtctaaggcagactttctcaaccttggcacttagggccataattctttgttgtgaggctgtcctgtgcattgtaggatgtttgacagcatccctggcctctacccatgagatgccagtagcatcaccccagttgtgacaaccataaatgtctccaaacatggccaactgtcacctggaagacaaactcatgctcagttgagaaccactggtctaagagtaatcccatcccttcccaattagtggttcaggaataggcacgtgacccaatcctgttgaatgggtcatgaggaaaggcctgctagtaagttcttagcaccttctcattggtgtcagagagctaaggggagcaggctgtcactcttccactggatgtgaacaaggaagcacacaccctgacggccactggcagccatcttgtgaccatgaggatattcgcagctaatgctgtggacagaggaagcctcaccctgatgtcactgttggcaagctgaatcagccagctctgaagagggcctagactttgaaccatttcttttctcttctttttttttttttttttgagaccgagtttcgctcttgttgcccaggctggagtgcaatggtgcaatcttggctcatcacaacctccacctcctggggtcaagcgattctcctgcctcagcctcccaagtagctgagattacaggcatgcgccaccatacccggctaattttttttgtatttttagtagagacggggtttctccatgttggtcaggctggtcttgaactcccaatctcaggtgatccgcctgcctcggcctctcaaagtgctgggattacaggcgtgagccactgcgcctggccccatttcttttctttttttgacaaggtcttgctctattgccaaggctggggtgcagtggtgcaatcatggctcactgcagcctcaaactcaaagtgatcctcccaactcaacctcccgagtagctgggacgataggtgtgcgctaccacacctggtcttgagccatttcttaatggatttccttattgtttaggccagtctgaatgggtatctgttacttgtgcctgtagcatctaacccactgtgagtcttccggactttataaaacaaggtcacttgacccatatcttatagatttgggctgtttcttccctcagtcctagtgccacaccctcatgttacacagctggtttcaaaaacaagctaaataaagcaccttgggggccaggcgcagtggctcatgcctgtaatcccagcactttgggaggccaaggcaggcagatcatgaggtcaggagatcaagaccatcctggctaacaccgtgaaaccccgtctctactaaaaatacaaaaaaattagccgggcgtggtggcaggcgcctgtagtcccagctacttgggaggctgaggcaggagaatggcgtgaacccaggaggtggagcttgcagtgagccgagatcgcgccactgcactccagcctgggtgaaagagcaagactccgtctcaaaaaaaaaaaaaaaaaaagcaccttgagaaaatttctacttgtggatctctgtacaccgtccccattttgtttattaagtctatggtcccgtcctgtgggccccagagaatagtctgtagcattttttataaggacattgatccacctccccaaatgacagccccatagttactagatcgttctgtctagaatgtatgctgccttccttct

SEQ ID NO: 94619 - DNA, 12995 bp, Homo sapiens
ataatagagataggaaacatatttcattgccaattctttcttaagatgtaaatagatgccaagtttcttccaggggccaaagaggaaagtacttttatattaagataatttacacaaaggttgttgcatcattaaaattgttgaagaaaaattattcatgacacttgttaaagacagcaaggcaggctttatttaagaggggccgtagtagtaagtataaggacatctgcaatggggttttgcagtaggggagagaaattggactcatcttcaacttcagcaaggacaagtggggattaaattaaaaaggaaaattaagctttcctatttaaagcaggagcaggatgggaggtcagtgaatgaaaactcactaagaggaggaaacatcaggggtaaagggaattcctgctgaaggcaggccagggtgataagatatcaagggtggtcaggtacctcggttgggggattttcactaacctgactttaaactggagtctacaaggacagagagggaagcccaaggatgggcctagtcaggcagaggacactgaggaacctaactaaagttttggtcaaaggagaagttattgtcacaacaaatcctagaaaaaaagcaagcttcattcatatcagcagttctctattataatagtaaaattttccttggaaaatactggatcgggagatattttagtgagcacggcctttggggtttgttacctcctttgggaggaggtaaatgttggttaacttctatacagaaccatccctgcgtggttttctcttactattcaggcttggattctaccagttaatttttactcttctattatgaatgctcctttcatcagcagcatcaaaagtcttgccaggtctctgaaaatctagctgtagaaacttctggattctagaaggtttgatacaattagtttcaataatgttttataataatattgtgttagaaaaatcctgccttttccttttatatgtaatattatttcagatttcagactgtgatgacttttgttcaggtatgactcttaaatacagcctgagatttgtttaatacatgggtgtttccagacatatgagataccaaaaaaagaggattaaccatgcaaaacattgaaggttccactgacagttctgccttagtgttggaagtagctattgtgtacattggcttctgagcacctttcttaaactcctggcctcgagtgatcctcatgcttcagcctcccaaagcactgggattacaagtgtgagccactgtgctggcaatgagcagcatttttatttgtctgtatttacatatgaacaggtcctccccctgagtaacaggaaaaccaggtttgatttcagcattgtcttattttgctgtattatttttatttttatattttattttatttgctgtattgcttttaaacttgtgtcttggtttcctacattcttggtcccaagttggcccttccagctctaatattttatgattatggaagatttatcagcaaaattaccaagtgattagttcaaattgcaataccctctttttctttaagaataaattctgtcaaatagctactttggaaaaaaaatctagcttcatagatgaatttattttgttaacctacttctttgagtccagaaactgttttaaaaggaaggattactttgatttaatgattttatttgtaaatctgctactgtacattttttaaaaaaataaaggtttctgtgaacaagttatagaaaaatgaaatattggagttgtgaaggacagtgatctttccactaaaatatgaaaaaggcaaaagggcaaactcataactctggaaatagtcatggcgtctctttaccaaatgccacactgtccgcaaatgtgtgaagtgtctctgaagggctcagtggaaatctagccagggcagtacctctgagagtacaccaacactgttggtaacagatgacattttggttattaatgaagtaaagaactgaaaacaggaatttagttggagacggtcagctggagagtctattattatgtacacaatactgtaggtaaccaactcagtacttacaggactaaaggttaagacaactatattcttcatgataatgtcctggaagatttttctcattttaaagcagtcacttttggcctttctcctgaacagacagatgacaaaaattgataaatgaggagcaggtgaatagaagacagagcactctccttcaacaaactgcagttttattcctgtactagtgagaatgtatgcaagatgctatatagatttttttttttaccacagttacaaatataaaaatgtattaagcaaatacataatttaaattgaaagactaaggaagttctttgttcaaatacagttagttagaaatattgtgggtagatgctataatatgaaaaaatagaatcatctgccatcttaactggattttcagagaaataataaatgatattaaaaacataaaagtgctctattatagaacataaaaagttcagttgctgtatttacttacattatttatgcttcacacaaatgaaggaatggctagattaacctgcacggacaacagtattattggacactgactacctaacatccaaaatatcaggccaggagcaatttcaagaagtgtgtgtagaatgtctatgagctgtgcactaatttccacaaggtaggagtcgagacgagattaaagacttggtccttgttcttgaggaatttataagcccaatagtcctgcatagaaaaccagaaatactcttccagtagagcactggtgcaccctcttgtcagtgtggcagactaggacattccacaaaggctggtacaggctttcctactaacctgcagatggaatgctgtccaactctgccacaaactcttaaagccacaatttcatgtgttcctttcttgatggaggtgcttatctacgcacacagctattagaacatctcagcataactgaacgtttgttcttggggtgaggatattatttattaaaatagctataaccaattctttttgtgactgttctagaagggacacattgcatttgtctgacattattcacagttttgaataacttattttggtgtcttatataagatcatgtgaattggcatagaggttataaaaataatctttggtaaacctgttaatctcttatttccattacataagcctctattttcagagcattcaccaacaatttctttatttaataagtgtatcttatatagacaatcttttaaaaaataaaatgccttatttgtgttgcatacatttattccgagggagcctccctacaagtcaagagtattctcttagccagaaatacttctattgctagaaacatttttagaacagaacagatttttcctgttatcatggctgcatcaaatgttaccctgcattttaactaaaatggccaaacattttcaaagtcatcatgcactacaagaatctaaggcagtgtgtctaaaatgccaaacccagtacatttagttaaatatctggtcaattcaaaaagcaaaataaattgattcaattgtttaatcagttaaaccatctggccaacatagagtgaatcctcaaaagggcaacatgtcctaatagaaacgtgtgacaggattgtccaagcacacccaggccacacagaagagatgccattttatcttcatgatgatgtctggttagattctgttttgcaaatattttctctttgcatcatttcacttgctttttgcagtcatcgtttacagattttcctttgatagggaacattctttgaatacctgatgtaattctaaatttcaggttaaaaatagcagggcagaaaattagcacggcattttctccttcaactcttcaggaatgaggtaggcttgagggcttgctcactgcaacttggaggaggatcagttattccttattgccactctgtcttggctaatcagttatattttcatttcctcagtgaaatggaacccagaaagcccttgaactgctatcatatacaagcagtttattacctattgattttcaccaggtcaggtttggtctggctcatgtttgtaaactaaaactctagagcgtctcagagtttgggctcagatactaccactgctgttgtgcagatctggtagctttatgatttcaggattccaacctcaaagaattcttagaaagctaagtgaatgagaatttagtatatggccaataatattattgcaaaaggtaaggaaaatgtttaacataagaaactggatccttaaacagcaaggcaagagaatcagcatgtgaagggtagcatgtgaggtctatttttatattgctggacatctggtaaatggtttaatattattttcacatgtcattttgggctttcttccgagaggtgattacaaaatttatcaaagaccctcccaaagaaaactgccccgaaaatgtctgtgtgctgtgtgccttttagtatttaaaagtgaattggccaggtgcggtggctcactcttgtaatcctagcactttgggaggttgaggtgggtggatcacctaaggtcacgagttcaagaccagcctggccaacatggtgaaaccccatctctactaaaaacacaaaaattagccagacatggtggcaggcacctgtaattccagctacttgggaggctaaggcagaatcgcttgaacctgggaggcggaggttgtagtgagctgagattgtgccactgcactccagcctgggcaacagagcaagacttcatttcaaaaaaaagtgaaattatggtcatctctttgatgatgtggaacctgaaaggactatgaaattatactcatgggtataaaagataatatgaacagtagataaaaatcacattcaactgggaaaacaaacatattcaagtaggaggagtggggcaagtaataaaacagagggactcagaggtttaagggatagagaattacttaggacaaatatgtgcaagcccaggtaagagaggtgagtctttgaaaattctgattcaagagctgaacaattggctgctttccagagaacaacagaatgataatacaaaattgatttaatgagatgaggttaaaggagttaattataacgaacttggaaaaataattattaagatgctagatgggactctcccaagatttgatagctcaaaagcactttgaagtcttgatgattaaagtgtactgcacaggtacacagacaggatgcccaccaagacaggaaatggagtgtttaccaagacataacacatgatgcaattaaatggaaataaatccaatagagctgaatgtcaaggaaaactttttttttctcctaaatttaataaataagtcaattatatatttagtcttcccaggagtaggagcgaatagtgaaatatttgttgctaagaaggtttaaaattaggtgtagggtaggaataaacatttcctgggttggattagactaaaaaaacctacgatttttccctgtcatgtccatttacataattctgatactaccctagatgttgccagagtacgtgagtgttatttactattacagatgcataggttttttttatggttttaactcctggtttgtgcaattaattgctctctctcctagatccagaggtttgctattaaagtagcattagcactttccagtgtgtggcctgtggaaggtgaccactgtcctagactggctcagttatcccattcccttgatgaggctgtcttttaagctcaattgaaggtagtaacaacaatcctaactttatgaggattctctttatgtgagtagaaatgtgtagattctggaacagtgcctagcaggttgcagatacttactagaagttttctgagtgaatgaaaagtcgaaaatgaatgtatccttccaagcattaatgtgctttgcatcaagcaacattagtgtaaaattctgctttttctcttttttcttttcaatgtaggaaaggtgatttctaatggatgccacacgttgtagatctctgacctctattttctcgctggtggtacatctactgcacttacacatatgttgttccttttcatttccagaagattcacttagttccttgatacagaatcagagcttaagactgtcatttcacaagagcattgagcacaatgaaactgtgaatctttgaagcttatgattatgcttcacatttttgtaaacttcaaataaccttggaaaaatttccagattgggtgtagagttatttaattataaagaactattttaggtatagtcaatgattttcaattattatgtcaattacattcgttgtattcacttacggactttatggtaggttacaaaaatatatactttgaaaagaaatrtactctttatgcaaaggaagctatgccatcaacaaacttgacctctaattcccaagtttattacagaaaaatttgtagtgtgaaaaaggcaaacatctccagctcatcttctcaggtatctatgaagattccgtacaaactcctttcaaatttttcccaggaatgctgtcggaactggaccttgatgaaggaaatactttctgactcattggaatttgttatagtcaaadtaagtaaggcacaaatattgaagataaacttggtacagtatgtagtgccttttgttattaaatgcaactttgggtgattacttgacattttgacttcattgatttactaaaagaagttttgaaaattttactgaagaccactgtttttgtttttgctattgtttttaaatttactatatatgatgtttgtagtcatttctatgaaaatgttggcattaagccttttaatgaggggcacaatctgctaccataatattcttttaatgggaaatcaagtaggaatggataattgtgacttttctaggaatggagaccactgaaaatgagacagaaactagtgtgtataaatacattacagtatgggtgtggatgttcacactccacaccatgaatgcaatgaaaggatctctaatcactgtagatagtgctttgcatgttatgtttccagtctgggtatagctggcatcttattaacaaaaggaattcatcacttctgtttggaatcattctctatcagaaccctcaaccctgcatcctaccatcctgggcttgcactgcaagttacatgatccctgagctgaccactttggcttgaatccctggaaggagaaaggagagagagagcaactagttcagacacaagcatctagttcagctttggtactgcttaattcttttttctccctccctctaatcctttttttgactgtcacatttgtcctaatagcaagttaggacatgtctgttggctctcgagattcatgggacagcaatgcagcaaatctagccatagtatttgctctctctagccctgccctttttcctgtccagtgaatatcaaaacaggtagaaaacatggcctgaaggattgtctctgccaccacctccatatgcattttaccagtagtcctgtcatacaggttgaattagttttatgtagaacaagtcatgaacactttagtgtggaaaaatagtattatataaagcttaatattaaacattatgaaaaatacatatttacagaagaaactacaaaatacaactatgtacaataatatctgttacctttaaattatataaaattttaaacattctccagattaataaattatacatagtatcaacagaaatagctggcacctctgtagggcatgaagcaagtttttaaaaacaaatcacacagtgaataatttttatccaggagctcttcaggtacattctcaatgccttgaatagactggatctgaaaggaagaacactgtaattagagactgccgcagggtgtgtcataattgtttgcgctgtttatgaaaattaccaatgtgaaagaccagcagaaacatatagctcaacctagtttaagatgagaccattcctattgggaccaggtaattccatttagaaagacagattattagacttggaagggactagtgattctagcccatcgcctctgtttttatggatgaagccataggcccagagaggcagagtaacttactcagggttacacagcttgttacagctagttagttcgagagttcggacctgaatcttagccttcagctacgtggtggttatccttttctataccatagttagcttctttcaggagtgctcaagattactctaaaaaaagattcttaagtcaaaacaagacaaaggaacctccaagatccctcagaacttgctcatactgaagcctcttaaggaatctcccatgcaaaaaccttaatttactatacagataaattagggtgtaatttgtaattattcataatacaaaataattatctgatttacaaaggactcctctaaatagtagctctttatttgtgctttacagatgctaactcattaacatactggctaggctgggtggtagagagaactaagtaaaaggttaggagacactacctgttgaagatcatttagaatggagataagagggtatgaaataatgtttgtcaaagaaagattatctgatttatagagagataccagtccacatggcaaggaattgtggctgcatctgcccacagccatgtgaacaagccattatgaagcgagtcctccagccccagtcaaaccttcagataatggcagccccagtctaagtcttgactgcaacctcctgaaagactctgggccagagccaccagtgagacaataaatgctgatttaaactgctaaatgttggggtaatttgttaggcagtaatagataactaatacaatcctccttcacatttgcagtttgcctatgtgataacttaggtcttcacgatggcccagagtaagacgacgcaggaggacccttctagtcatttaattattgcttgaccagaactgtgccttgtaaggtttgtgttttttttctattgaatttcccacttgaaaagtgttatgtgcttattctagaacatttataaaatacaaaaaaatagaaggaaaaataataatttttctaatgttcagggaaatttatattttctccagtctttttccttatgcgttgtttttgttttacatcctgcttttctttatttagctattataacatcctcaaaaatagcattcttttgtttgttttttctttttttttttttttttttgagatggactcttgctttgtggcccatgctggagtgcagtggcatgatcttggctcactgcaaccttcgcctctcgggttcaagcagttctcctgcctcagcctcccaagtagctggaactacaggcacacgtcaccatgcccggctaatttttgtatttttagtagagatggggtttcgtcatgttggccaggctggtcttgagctcctgacctcagctgatcacccaccttggcctcccaaagtgctgggattacagtcttgagccactatgcccaccctgtttgttttttgagatacaatcttgctctatcacccaggtggagtgcagtggcacaattacagctcactgtaggcttcaactcctgggctcaagtgattctcctgcctcagcctcccaagtagctgggactacaggtgcacaccatgcctggttaatttttaaatttattgtagagaaggggtctcactttgctgcccaggcttgtcaaacttttagctacaaaaagcttcatgcataattttttttttgttttgtatatagtgtggtaggagaaatacagggtcacaagataagaacatatgaaggaccctgataccttgattgacaaattattttccaaagggattttacaatttgaactagttgtgatttcaaagaatcctccccaagtagtaaagcttattgcttggaaaagaaaggttaagcagagtccttcatagcaggcatcctcagctaggctggaagagataccttgtgaaactgctgctcagctgcaggaaccccctccctaccctccctctcttccccgttgccactctttatgggtaggagaagaaatgggtggtgtacattggaagagctttaggttattaatggtttccagaatctttttcttttttctcttttcttctcccctcccctctcctcttcttttcttttcttttttttgagacagagtctcgctcttgttgcccagtctggagtgcagtggtgggatctcggcccactgcaacttctacctcccaggttcaagcagttctgcctcagcctcccgagtagctgggattacaggcgtgagccaccatgcctggctcttttgtacttttagtagagatggggtttcatcatgttggccaggctggtctcgaggtgatctgcccgccttggcctcccaaagtgctggtattacaggcatgagccactgcactcagctagaatcttttctttctttcttttttcttagaggcaggatcttgctttgtcacccaggctggagtgcagtggtacgatctcagctcactgtagccttgacctcccaagcccaagtgatcctccccctcagcctcccaagtaattgggactacgggcatgcaccatgatgtctggctattttttttttttttagttttttgtagagataggatctccctatgttgcccaggctggtttcaaactcttaggctcaagtgatcctcctgcctcagcctcccaaagtgctgggattacaggtgtaagcctctatgcctggccagattgaccatatcttgatgaagaaacttggggaagtaagtgaagtaagtgcccacctctgtgatactctggattcacattttcatagattggaaacaaggggttttcttgttcactccgtagctttcttgctctgaggacatctcttacacactgatgtaggtagacatactgacactgtggaaaagcagaaacatgtcagaggagggcctgttctcatgcataagaaagatgagaaactcacaaactgttgacaatgatgggattatatagttagcaaatttcttgaacatcgcttcactaatggtctctggtaaataaaagagtgactgtcttttattaccactgaaaagagaacaatggtaatgggcagagaggtggcatttttcattctttttatatatatatgtgtgtgtgcatatatgtgtgtatatatgtgtgtatatgtgtgtatatatgtgtgtatatatgtatatatgtgtatatatgtgtatatatgtatgtatatatgtgtgtatatgtatgtatatatatgtgtatatatgtatgtgtatatatgtgtgtgtgtgtgtgtgtatatatatatataaaatattctgtgagagcctacaactgtgtctagtacgtagtaggtcctttacaaattgagtagatgaacaaatgccggacactcctatgtagcttacgtaaattacctcatttaatgatttcaaaaaccttgtgaagtaaatacaattatcagtacaaagtgagactcaaaagtaacttctccaaggtcacacagctaagaaatggggccctagggtttgatcttggagatgtgacctcaaagttcatgtctttttcactacaccagttttcttagatgaatcccaatttcattgcattactgaatgagaaaatcatttcactgcatactctgctggtttgttccctttattctaggaagatagtgaaaaaaaggaggtgtgtacaataagccccgctggactgttagttctttgagtgcaaggtcagtgtcttatccacctctgttctctcagcatctgggtctgccacgtggaagaatctcaaagatgttggctaactgcagagaactacaagggttacatagcgaggacagacccatctgttggctatttaagaatttactacttttgaaatataaatagatatagaagagtcagtgctttggtgaccataaagacctccactgccactgtgtctcagccacaggcagccaagcttgtgcattgggcccccttccttatactccctgagttctcttataaggaaattgatttctgcggaaccttcccttgctgataacttcccttgctgagcaactgctcagagggagttgtgagcagtgaaggagactgggctctcagcagcctccagccaggccaggctgagccatcaggcttctggggatcccagtttccccacttattaaacaaggaggcaaaggtctcttttatagctaacatcctttgtctattaaaggatatagattgatgtcagacagatagatattgaaaaatatttccagaccttgtgtttaaggcaatcagtgtagtcagtcttaaaagtattttagaggtttgagatacaaagtagaacaattagctctttcctcactaacaatctttccaagtaaacaggtacttatttttatgggttggcactagatactgtccctgattggaacctagcttggccagctatccatgggactatataaggtaggtctggtataatcaatagataagaacatttaatttaattaatttatttattttttaagaaacagggtcttgttctgtcgcctaagctggagtacagtgacacaatcatagctcactgcagctttgaactcctggtcttaagtgattctcacacctcagtctcctgagtagttgggattataggtatggaccatcaggcctggataaattaaaaaaaaatttttttagcgacaggatcttgctctgttgcccaggctggtctgaaactcctggcctcaagccatcctcctgccttggcctcccacactgctaggattacaggtgtgtgccactgtacccagcctagaaaaggacattttaaacaaatcaataagaagtgaggcctgcaataatattgataactattctctgcttttctgctcacagacctttgtcatttattatgaatgttacatgcaatctcaa

SEQ ID NO: 94620 - DNA, 12462 bp, Homo sapiens
caaacttctctggcaccctcgctcagccctcctggggtatcctgaaagaatgggtctttgggagatagttgcttattctctgctccccttctttcaaggcaccttcagagtctactattaggcctctccttcatactagtaaggtgctggctacttactagcactttgatgttttttcttgtgtcacacaagtgtcagaaccagggggcattttagacattattcaactgaaactccttgtgttataaatagtaagaagactgagaggatcagagtgatgactgagttcaatgcacggttactgagtgctcctgtgagctagccatgtgcctggcactatgaagacagagaagcacggaaggacctgatttctgtcccacgagtttaccgtctagttgggaagactggatgctcttactggatgaaagagttaaatagcaaaacaaggtagtacacgatttagaacccaaatgagtgatactatgaaacagttaatgctaaaggaggttaggatttgtacggcaaggttcgtaaatgtgatcctgagcaaactcatatggtcaagatgagttctaaaggatggataatatttgagggaggacttgcagggaagagggaaacagaagcaaagctgaagagagcaaaacatgtgctggagacaaaaggaaaatcaggttattaggatagaatttggttagaatagtttgtgttcggagggaagatagggaggccactcatacggaatgggtagactggacgcaaggtgagtaggagaaggctttgattccaggctgggaaggctggatgttaccttgcaagcaagagaaccactggagataaacagatgatctttagagaaatgatgcaggaaaaggaatattttaacaagatccatccaacattattatacatgctcaattaaactcaggagaaagggtaggcaaggaggcagttagaaggtggtgagagtcatccagacaggcagtggaaagggagagaaatacgtacaagagaaccaataagactaagtgactcaagtgcccctccatactttgatcatgctaagtattcagtctgttagcctactaatcgatatggggatgaaagattagaaacagtcaaaggagaccagtattttcaactggaagcgccaaaaacagaaacaggggccttacaaggggataatcaggttttgagaaaagttgaattctcagacaacagaactgggtgcctgatataactggtaggtagtgaagattcatgtcactgaaggtattcaagcccaaaaaccatctgttggtaacgttattgccaggtgcattggctcacacctgtaatatcagtactttgggaggctgaggcgagtggatcacttgagtccaggagtttgagaccagtgctggcaacgtggcaaaacccatctctacaaaaaatagaaaaattagccgcactttggccgggcgcagtggctgacacctgtcatcccagcacttggggaggccgaggcaggtggctcatgaggtcaggagttcgagaccagcctggccaagatggtgaaaccccagctctactaaaaaatacaaaaattagccaggcgcggcagtgggtgtctgtaatcccagctactcaagaggctgaggcaggagaatcgcttgaacccaggaggcagagtttgcagtgagccgagatctcgccactgcagtctagcctgggcggcagagcaagactccgtctcagaaaaaaaaagaaaagaaaaagaaaaattagccacacgtggtggtgcaggcctgtagtcccagctactcaggaggctgacgtaggaggaccacctgatcccaggatgtagaaactacagggagccatgatcgtgccactgcactccagcctgggtgacagagcaagaccctgccttaaaaaagaaaaaaaaaatacacttctgatcagagcaagagctaagattcaatgaactcggaagtgccttcctgctttgatattctatgaaactgggtccatgtaagctagtgaagagccttgcccaaggtcatgcagctaattagtgaaagaggtgggaccagaattcagggctattcatgtctggttcagtattcttaccactagactattttaactttgattgtagtctgagttgtactctcaggggtgaccagaaaccccatataaaaacaagatcagtaaaaattggctctgaaatgaaacaaagctgcagcacggcctgacacagtgtacagagtgtaaatttgaggatcagatcgaagtggctctgtcactcactcctgtatggctgtgggcaagttactcaactcccacacacacagacattgtttccttacctacaaaataagcataaatatttctatctcatggggatgctgcaagataagtaaggagatgtttttagatagattgatcacaaaagagataatacacacacacacacacacacacacacactgctgagttcagtgtcaagaacatagtagacattagagatggcattcagtcttcttctcttgtgatctggtgggaacaggcattgaccaatcagagccaagactggctcatctccataccagtgcacacaaggtgactcttagcccacaagaggaggaaatgtttaggccagccctgggctcctgctgccatccccactctgtcacttcaaaggctggcagcttgggtctgtaactgttaatgaattatcaataaacaggaaagcagtgtggcaaggaaagataacatgaactttggagccaaacagaaccgaatttcaaatcccggccctgccacttactaaatctgtggatcttaacctgccagaaccttagtttccttttctgtaaaattgggataatattgtggaacacacaatacagtttatatataaagttgtacacaaagcacaatgctttggctcgtgaagcaccttttaaaatgaggttctttactttccaccaagaacctagaactgtaccgagcacattttagatgctaattaaatgatgcttggtagcatctctttcctcctgctgctgctgtacagccctgtgctgacctgaaccataagcaatgcggtgtatgttatcctggctgcctttagtaggtagtaaatagtatactctatcctaccatactcctaagcattttaccactcgccacactactttgaatatgtaagatatatattcctcattcaatattgtttctgcagaaatgtatctgaaaagatttttaaagttttacttttgaaattatttgactgcaagtaagttgtgactggcactgttccttctgcattcaaggtttccaggtacttaggaattcctacaaaattagaaaactaaccaaagattgttttccaatgtagtgagatttttatgtgtcccaaatttcaaaataagtgaaatcaacttcatgctactttagtagcaggtaagtaaatattttttatttgattctatatttgacttttcctgtattggagccaatatatttttcccagtctcaaatgttgtaggcccttagaaacctcccagattctaagcactgagcctcaagtgcttaatggataaaacagccctgaggctgtggcagtggggaaaactcatgatgaatgactaggatcaaaacacacaatcaaaggaaccccattcccaggcctccctgagtgaggctggccagctgcatgggccagtacctacttcagggaaagcatgtttgcaacgtatttggaatcagagcttgcaaagtctctggtcagtcatcttggttggcagtaaacgtttaggccagccctgggctcctgctaccatccccaccctctcatttcaaagcttggcagcttgggtctgtaaccgttaatgaataatcacttggtaacccttccatcccaatgggagaggctcagctgagggcctgcaagagagaaatgacttcctgggacagggtggtgggagggagtagtgcagagggagggaaagatttgttccctgctgcccaagtcaactgctttctgggtaatgttttcctgggttcaaaaatcaatgttttgtttgctttgtggggaggagtgcacgaagggatccctgctgtggaaaaggtgagttctactggcaaacaaggctcctccaccatgtttgcctgagatgacaaacatctcagaatttttacattcagaaatgcagatactaggagcctcggcgaattttgccattttggagagcactttatcccaaaggtggagaagttacacaaatcccagaggttgagagactgaggggagtccaacacactatcgccgacctgagaaactgcagtgcagagccagttccccaactgcagtcatttgctttaacccttgacaattttcacaatatctgcttaccacccctattattttaataatacgctaaatatatatttactcatttattttaaataattcttttacaatgaaactgagtaatgccatctttcaaagaatactagtgttactttgtaaacagaagtaaaaataaatgtaatgaatatcatctaacttttaaaaattctatccagatattgttttcagctgaaaactcagcctgaggcctgttgtcgttattgaaaaggaggagaaacaaacacgggaaagtgtaaaagaattcaccttcttgctctaagaggagactttctcttaaatgtttttagaagggtctgaagaaattaaggcaatgagcacacaccacctaaaaccacaaacagagacacactcactctgctctgctcctatgggaaactctttcctctttcctttttagcttggcgccagcccaaagggatgggttgaacatcaggaagctcttagccccagctctgccactcactcggcggccttggaaagagtacttgcccttgcaggaactcaagctccctcatctttaaaatgagggagtcaactgagatgaactctaaggtcccttccagccctgaccctctatccttccaagacattctccagcagggcaaaatgtcaggcatggaaagaacccaactcgccatgctgctttgacagctggagctgcgatcccttcactaggagtgatcattttttctaacttcagtgagaaactgggccacagaatggggaggaatgcatttgactccacgaccttaataacaactctttcagggacacctaagctagtccagcagagtggggtattgacctttcacatgtttttcttcaagatttagtttctcttaaccgggcgcggtggctcacgcctgtaatcccagcactttgggaggctgaggtgggtggatcacctgaggtcaggagttcaagaccagcctgaccaacatggagaaacccagtctctactaaaaatagaaaaaattagctaggcgtggtggtgcatgcctgtaatcccagctacttgggaggctgaggcaggagaattgcttgaacctgggaggcagaggttgcagtgagccaagatcgcgccattgcactccagcatgggcgacaagagcgaaactccatctcaaaaaaaaaaaaagatttagtttctctttgtgatttctcacagtctcagaaaagatacctgggagtgtgggaagaataggagttagggaacttgagaggtcctggttaaaatcttgtatttgacacgctctagctgtgggataataggaattttcttaactttcctgagcctcattttattcatatatatatatatatatgtgagaaggtaatcatacccataaaactattgtgagaggtaaagaaggtaagtgtttattagaggcacaaaaaggcacattatctgctggtactaaacaatagaatgccaggggtgttcaatatcttaggctgcacattgccctgcaataactggcttagggtatgaaattcttagaaggactaacaagactcccccatgatgacctattcatccacctacctcctcactctgttccactgtctcccttaagagagatggcaccggccagagcaggatgctgcyccctgctgctgctgcttctggggctgtgggtggcagaggtcctagtcagagccaagcccaaggacatgacatcatctcagtggtttaaaactcagcatgtgcagcccagccctcaagcatgcaactcagccatgagcatcatcaataagtacacagaacggtgcaaagacctcaacaccttcctgcacgagcccttctccagtgtggccatcacctgccagacccccaacatagcctgcaagaatagctgtaaaaactgccaccagagccacgggcccatgtccctgaccatgggtgagctcacctcagggaagtacccaaactgcaggtacaaagagaagcacctgaacacaccttacatagtggcctgtgaccctccacaacagggtgacccagggtacccacttgttcctgtgcacttggataaagttgtctaagccctggtgcccacgttccacctcacactctgcagactgtatgctgctgcttttcctccctccagttcgttattaatccttgctccccactgcaaatgccatttccctcccacacactcaacctcacatactcttggtttcttagggagttttacagacgctccaaacgatgagagaagagggcagattctcttcagcctttcattgtagcttactttgcagcccttccagagtcaagcactcaggatccccacaaggatggatctgggtttggtgaggcctgtggctcaccaaagaccctcttaaagaaaaagaatataaaattacaaacgtaaataagtcagatccttggaagggctgtggctggacagtccagggagatcccagacaggggtaattatctaaggaaggaaggaaggggaatctctgctgtgttccctgtgttgggcaaagaaatgcatctgatcttgctgtaataaagactctgctgttgctgatggagtgtgtgttactgtcttggggtaagtggagaggtttggagctccaattccaaggccctgaaaaggccctgaaacacttacttctgtgaggcatcagctccacctgccttgcaggccggagggagagcagcaccctgagcaggcacagtctgggaagctggcttgattctgtcctccagccccttgagggctctctggtggccccctctcatgtgaaggggtagagtgacaggaaggacaggctgagccctgggatgccagtcaggtctgaggcctgacccccttgtgtgtgcgcaagaccagagttcatgtttcatcgacgtgacccagagcaggaccctcagcgttctggagtgaacttccctccttggggaatttcagaatcaggacctactaggagtcctgatctggtcttaatcattgctgaagactaactgtggtaaaggagcagttttatatgcaatcggccatagaccaatacttttgtaaaatacaatacaatgaattactagaaaatgaaatagaacatataactatagaaaatacaagctcaattgttttattactagattcaatttatataaaatactctgtcaaattgccataaaagttactgggtttttttgggttttttttttcttttgctttttgttttgagacagggtctcactctgtcacccatgctgcagtgcagtggcccaatctctgctcactgcagtctcgacatcctgggctcacgtgatcctcccgtctcagcctcctgagtatctgggactacacgtgcaagcatggcaccgcacctggctaatttttgcatttttttgtagagacagggtttcaccatgttacccgggctggtctcaaactcctgggctcaagcgatccctcaactcctgggctcaagtgatccacccacctggacctcccaaagtgctgggattataggcgtcagccatggcgctcagcccataaaagtttcttaatgtttcctctcaatttctgtacttgtattgatagatattcacagagagaaaaacatacacatattatacacatatacacacacacatacctacataccaacataaggcacacacatacacacccccatatgcatatacatacagaggaacacatagtcacaacgtgcacctgtgtgcacaacacccacacctactcatatactcacactcaacaagacaccccctcttcttccccatgctatctctgcctccttattacacctcccttcccatatttggaaagagagtttcctacacaggctatgattcagagtaaggaaaggatgtctggtgaaacgtgaagtggcagagaaagcatagaatccagaaattcaaaatcccagcccccttctatgctttctagaactagaactcaatgcagcctctcacaccaacaccatctcaccccaagcgtagtttcccccacagcctccagccccctccacattgccctgcccatcactaccactatgctgcccaccctcgtgcttataaccagggaagacatctggaagtgagacagaagcagcattcttccatcccctggcttcttcccagtgttgcgggcaggctccacttcctgcggctgcgccttaaatgacggtgtttcccagggtcctgttctgagctctcttttcttcccacactgtactctacttgagtgacttgatttacttccatggctccaaccaccattaacctactcccaaagacaggtatatctccagcccagagctcccaaagtccagtcatacatgtccatcttcatactgttactagcccagtcagtgtcccacaggcatctcaacccaaaacactcagaactaagttcataatctgcctggcttccaaacctgcccctcccttctcctgcagccttcagtgttcgttagtggaaacatcatactcgatcattcaaagtcctaatctaagacacatctgtgtcaactcgtgcttgtttgtctgtttctccagtaattgcccaccttatcccaggaactacctcaagaggacataaaagttattgagttttattttcttttgtccaaatagcactgggttcctaacgtgtgctcaatacacattacggccttggagggggccgtgatttggagctaggcaaatatacctaggttggtacaaccgcagattcactatcttgttgagagggcgagattaaagagtacatacgaaactatcaagtaataagatagaaaagaagaagaaaccaaatggattctgtaacatttttctcccatctcccctagggtttcattcatcccaaagttcattctctgttgaatgttaattttcccgttgcatatttctggcacagcattaggtctgtagccagggttaggcaacaccaggagaagttcaaccattcaatatctgtaagagttgtggccccggaagctgggaagagtgtgaaaagcattcagagtagaatgaatcgttaaggagactaattatatccaaacaagtgggggtagcaacctgggtaggagtttctgacttccttgtgtaggctgaagaattagatggcgtgtaactggaatctaggggtcatgggctgtaaaactggcccactctgagggtaatgacacagcacccataaaacagggctcagtggtgaagctgrgaccacagaagagctgcccaatagccttgggaccgaatctctactgggtgtgttctctgggcccctgagaacgtgtttccaaaaaatcacttgagaaggggctcctcagccatttgggaggacataaatattttccagtgggtaagtatgttctaacatccagaaaatttagaattaagtatagaaatgtttaaaagaatcaacacatagcgttaacatgtttgtattaaggaatttgtattaggcttgtcattctaatttaaaatgcacatggtttgaaatgaaactttcctttaaaattagttttggatcatgtaagaaaacatagaaattgaatcatcctatttagaaattgttagatttataaaggtttttaggtattcaggaatgttttgctggttagctcaaatgcccaaattactttataaggacatggaatatatattgaatttataaaatatctcttttaatgtttaaagagtttcattaactacttacaaataagatcaaatagtcggtgaatacaattctttaaagtgattattagaatttatttctatgtaagttaaacataaaagcttaaggaagctgatttataactttaacataggaaacataagtgttaaaaagccaagtagcctctaaatactctttgttggacacaaaagaaacattttaaaaactcacattgacactacaagaccgattcatgttctatgatattttcatctgtactgcacagtgggctttggtgattatattttccggtgttaatatgtttgttgattttgctggggcgtttagtagggagggaagctcaaggctcaggctcaagggcatgcgactggcagtggagccctcagagtggaacctggacctctgtctctcctcagcattctcctccctctgcactgtgctgccttcagttgggttatttttctgacttgggaatgggagtattatatcctagaaaaactgagaaaggtgagcagggtttgcctgaggcccgtgtaggggtggcagaggatttcagcaaaatatactcccagaaaaagtaaaactcaaaggctgtggtcaggtctccaccctttatagggacttttcctccttggccaaacttggagtttgagactacttttactaagtagagtagcttttaaaatgtaaacaaaacaggctgggcacagtgtgtgtgtgtgtgtgtgtgtgtgtgtgtgtgtgtgtgtgtgtgttttgttatttgagatggagcctcactctgttgtccaggctggagtagtgcagtggtgcgatctcagctcactgcaacctccacctcccaggttccagtggctcatgcctataattccaacactttgggaggctgaggcaggaggatcaatagagcccgggtgttcaagaccagcctgggcagtatagtgagaccttgtctctaaaaaaaaaaaaaaaaaattgttttaattagccaggtgtaggggtgcacacctgcctgtagttccagctactggggatgctgaagtgggaggattgcttgagcccaggaggtggtggttgcagtcagctgagatttcaccactgtactccaggctgggcaacggagcgagaccctgtctcaaaaaggaaacaaaagcaaaaacaaaaaacggattttaagcaaccagtttcttcagtaaattagagtgcctgcctaaaagtggtgtgtatgtgtgtgtgtgtatgtgtgtgtgtgtatataaacacacacgtgttcagggtgaggaagtaaagttctgttaatggaattaggagtgctatattccgccaattacagatcttttgggattccaaactcctcatctgaagtgcaaatatctattggcacaaataagataatgtaacaattacttggaatcaatcacttaggtgttggatttggcttggggttatttggaggcaaggcaaggatataggttttgtaattggggggtcttatgcgtatgttcaacatgggcagagacctggaggtagacactaagtacaaaaaaaaaggaaatgtcaaggaactagagacaaagttttatccgctgcttggcagttctgaagtctggaggatgggaatgacttcacgctgttggaattcctagattgtctgctccagaagactgactctgctgggggtmtgccaatgagagctgaggccactgctagctataacaggcacaggttatgtcttaataaatgttcatttaacaaaatgtggttttggagcaaagggctgggggtaggaaaatgtacagatcacaaatctggaaagcttataaacaatttctttaaaagctctctcattatgcttaaaatttttcagtgagagggaatttacctatggagatagcttgtcccattttcaggcaactctaagtattcaaaactcccttacatagaaccgaatctgcttctttataactgcaacaattcactgatgccctaccgctttgagccattcagagtaagcccaattcctcttcacaatcaacctttttaatattttaagagtgtttcatgacccctgccctccacatattgccacatctggcagtaacaaatgttataaaatggctcctaccatttgacccaataattccattttgtaaaatatgtcgaatgggaataattcaaagtgcggaggagtacatttctacaaatctttttataccttttcttcatacaatggagaaaagttaaacataatataaattccctaaaattgagagtgactaaatgaatagtgaacaaccacttgatgcctttttttttttattatttttgagacagagtctctctctgttgcccagg

SEQ ID NO: 94621 - DNA, 56506 bp, Homo sapiens
acctccattgtagtaagaattttaaagcataatatttcttagcatattattgctaacatgcgtctattttgagactagaaaaaatagtcattagtaaagaaacgccactaaaaatagcttagaaatatttaaaatgcaagccaggcacagtggctaatgcctgtaatcccagcattttgggaagccaaggcgggcggatcacctgaggtcgcgagttcaagaccagcctgaccaacatgggaaaccctgtctctattaaaaatacaaaattagccaggcatgatggcacatgccggtaagcccagctactagggaggctgaggcaggagaatcgcttgaacccggggcggggggcggaggttgcggtgagctgagatcgttccattgcactccagccctgggcgacagagcgagactccgtctcaaaaaaaaaaaaaaaaaaaaaaaaaaaaaaaaaaaaaaaaaagaaaaagaaaataaaataaatatttaaatgcttcagtgatttcgatattttatttcgaatcgcgccgtgggaataaggaaatatatacaaaatgatacagcacggcgtcctcgggtccttctaggtctgcgccagtatttaaggataataattaatcgcgctgtaactgcctttgcattgggcaaaccgtggttactgaattgctggcaaagaggggcggagagtgttaagaggcccggagccgggtctgaggctttaatagaagaagcaacggcgggacgacgtcaagccctggcgcggctgtgggggcggcggccagcggaggggctggggggctgcaggcgccgggcgcgccaggcctgggccgcagcctcgggagcgggtgtggcgggcgctgcgtccgctcaggccgagggtctcccggcgcgagtctaccccgtcccgcctcttccccttaccacgtagcccccccacacgtagaggaagtttccgtccaccacggcgcagtggccgctgcgttcctccgccacacagaacagctgagagtccgccattcgcgccgtcgctggcccgccgcttgccgcgccacaacccctgcccgcccggcggcctcgcctccagccccgactgctccacgcacgaacggaacgcggcgagggtcgagattggtgggaaggcggagccagtgcgtctgcaacgtcccgcggctctcgctcgggaagtcgagccaggggcggcgcggctgtggagggacgttctggctcctcgcagtgggcaaggggcctgggctttccacgcgcagattccttctctcttggaattgtgttttggcagtacagcctcatttagtagtcagtctgtagtcagattccttgattatctcaaaatgtcttttctatagttggtttgttcagcaccgtaattcgttgttaacgcctcttaagactttacgtctgttttactctagaatagcttctctcccttctctcttgtgccatttgtttgttatatggattagttttcttattttcctacagccgtaccaccttctgggtttggttcctcagtgtcttttctcattaacttgtgcatcctttccccatacttcttttaggctggaagctgtatctaaaagctttattagattctagttcagatttttttttggaaaatacttcatattgcatcacattagaaggcacttaagtctggtgcactttaatgatactttctattgtttatttttgactatacaaataaacagagtatctgctccttttcttacacgaaaggaagtatatacagtgttccttaactttctcttttcacttgacgatccatatcaggatacagcaagcagtctcctcagtccttttcatagcttcatagcactccaccgattggatgtgtcatagcttattcaaacagattcttattgatggacatatcggttatttccaggtttttttggctatcataaataatgctgcgatgaataacgttatgcatatgttattttgtatttgtacaagcctatctttggagtagagttctagatgtggaattgctgggtcagaggataaatgcatatttaactttacaaatgtaactggattgcagtggctcacgcctctcatctaagcactttgggaggatgaggtaggcggatcacttgagctcaggagtttgagaccagcctggccaacctgggcaatcccgtctctactaaaaatacaaaaattagccgggcgtggtggcgcatgcctgtaatcccagctacaaaggcaagagaatcgctttaacccgggaggtggaggttgcagtgaaccgagatcgcgccactgcactccggtctgggcgacagagcaaggttccttagaaagaaagagagaaagagagagagagggaaagggagagagaaagaaagaaaaaggaggaagggagggaaggaagaagggagggagggaggaagggaggaaggaaggaagaaattcaagatagacaaaagtcatctatgataatagaaagcagaaaagtggtcatttgggagtagggagggggaggggactgatggaaaggagtacaggaagtgttctggagtgattaaaatgttctgtatcttgattgaggtggtggttacatgggtgtatacatttatcaaaatgcattgaactgcatacagatatgtgcattttacttagtgtaaactatatgtcaatcataattctcactccatcactttattgttactagtaatattggtattgtatttttgaaatggagcacttgtcctcctggactgtagagtctggtggagtctatagaccagcaaacagacaattaccataccgtgcagtaagtgtgaaaatagcaaaagtccagggcaccttgggtgtacagaggccctttaactcagattgagggaagacagggaaggttcctgagagaaagtaaagtctaagttaagaactgaatgatgaacggaagttgttcaaggaactttcattcgtgagagggaagagtcaaggatatgcctagtttaccagcttggtcactgggtgggaggtgggtggagcccttcgctaggttattgaacatgggaggaggaacaggtttgggggagggcagggctaatggtgagttcatttggaggcatattgagttggatttgaagtctaagagagctaagggctagagatagggattttggagtcatcagcatataattgttcatttaagtattgggactttatgagctggccaggtgaaggagccatagaagaagttgaaaatttattagagaaagagaattatgattgggaacatttatgggaaaaggggaattgtgaggtcagattgtgagagaaagctgggcaactggaattgattattttctctccaatttcttaatataaaaagtagcaaaccaaaaaaagttgaaaaaatagttcaaagagtacctgtgtatcttccactccaggttaataattattaatactaccatactagctttatgtttgttggtatgtgtgtgtctgtctttttcattttgttgaattatttgagagtgggagtgccttatggagaaaatacatgtgataaataagcttccttcagctatgagttatagggctcttggccctgagttcagtgttaacgaatcacaatgtaaagatgtctttacataaaaacacacataaaacaaggttataggccgggcgcggtggctcacgcctgtaatcccagcactttgggaggccgagacggggggatcacgaggtcaggagatcgagaccatcctggctaacacggtgaaaccccgtctctactaaaaatacaaaaattagccgggcatggtggcgcgcgcctgtagtcccagctacacgggaggctgaggcaggagaatggcgtgaacccgggaggcggagcttgcagtgagtcgagatcgcgccactgcactccagcctgggcgacagagcgaaactccgtctcaaaaaaaaaaaaaaaaaaaaaaaaaacaaggttatatgttgatcagttgatgaaaacattgtcaccagaggctcacaggaacctaattctgtacttcccctagtaggaatggtttagtattcaataattatttgttggtggctacttataaaatctaactatcacaggtacagtaatgagaattaactatatgtctttctattcgtatttcctatcctttcttacataaaaattaaaaatttctttgtactttttgtctttgaaaaatatttcactaaataaagagaactgtgttcaaaaatcacttgtgatgttatgttaccaatttaatatacaattaggtgtattagttttagtatgcattcaattttaagctcacctttttattttctattttttgaatatgtaaaacatgcacatggattaaaagtctcactgtaaagaaagttttcactttcatccctatcccctcacccctttgtagttaaccatttttgtggtctctgatttaaccttccagagttgttttgttgttgttgttgctgttgttttgagacagagtctcactcttgttgcctaggctggagtgtaatggccccatctcggctcaccgcaacctctgtctcccgggttcagacaattctcctgcctcagcctcccgagtagctgggattacaggcatgcgccaccatgcctggctaatttttttgtatttttgtagagacggggtttctccatgttggtcaggctggtctcgaactcctgacctcagatgatccgcccacctcggcctcccaaagtgctgggattacaggcgtgaaccactgcgcccggctttttttgtttttgagacagagccttgctttgttgcccaggctggagtggtggcacgatctcggctcactgcaccctccgcctccgaggctcaagagattctcctgcctcaacctccccaggagctgggattacaggcgcgcgccaccacgcctggctaatttttttttttttttttttttttggtagagacggggtttcaccatgttggcccggctgttctcgaactcttggcctcaagtgatctgccagcatcggcctcccaaagttctgggattacagatgtgagccaccgcgcccgggcccagaggtttttaaaatgcaaaaacaaatacatatacttttgtttcccttccttcattaaacttcgcttttttttaaaaaagaaaaaaacccgtatacgttggaggtcactttatattggtactgtgaaatcatcctcctgttttataagccgcgtgtttacttataagcactccacgggttagtcaactcattggagcaagcgttttgaagtgtggcagattgacagtccacctgaaatcagaataactgagttcaaatcctgactacaccatttaactcgtcgtttcatcttgagcaagtcctttaccatttttgtgtctcagttttctcatctgtaaaatgaggctgttgtggaaaagacagtagacagctcactgggctgtcatgagcaacacatgaattcacacatttaaagtgcttatgacagtgcatggcgcatacgaagccctcaagttaaataaaaatcggggtaggtgggagcgatggagatttataacagcttccggtaaatgtcgaggcacagtatttccagagcttgtgcgaagtagggaacccaacagctctcatggcctcgaaagaagggggatcctgtgtccgggaagctcggccgcagtcctgcaatgtctagggcagcggtgagagcgctgtggctggctcaacgcagcccgacaccagggaagacgctctggccctcagtttcccggcagcaaaggagcgcgaggtggtctccactttcagcctactcggtccggggttgcgaactgtaaggtctgagttgctgcggcgcaggcagcggagaccaagcagggatcttaacagggtttagcgccacgcgggccagggccgaggccggagctgggaggggcgcgcccgggaaggggcggagctgcggcggtggcgccaaatcgcaaatatggcgccggagcggctgcggagccgggcgctctccgccttcaagttgcggggcttgctgctccgtgggtgagtgggctcgggcagcttgaagggcgagagggaagagctggggcccgtctgcctggtgcggcagcgggacgcaccgcggcggctccccgcgcgccgagagggggcttgaccttaaatttcagagttctaagaagcggtcgggcgcggtggctcacgcttgtaatcccagcactttgggaggtcgaggcgggcggatcacgaggtcaggagatcgagaccatcctggccaacatggtgaagccccgtctctactaaaaatacaaaaattagctgggcgtggtggcgcgcgcttgtagtcccagttagttgggaggctgaggcaggagaatcgcttgaacccgggaggaggaggttgcggtgagccgatatcgtgccactctactccatcctggcgacagagagagactccattaaaaaaaagttctaagaagcgaggtggatcttgaggctgccgtgccttctttggtttccccgacccatgcgaggagtttaatgtttcttctaggcgggccgaggctcttctgcacatgtcaaactgagcccgagaagctgcaacctatctatggcagccggttatcaacattgtgacctggacagctctcaggctcccgggaaggttgctgagacataagatgagagacccgagaaagcccacttgcacgtctgcagttgccaatttatgtgaaagtcaggtttcctgggcatatccgtgtttttgaggacctatagaacatatgaaccttcccaagatttctctcattaaatctgctccgtgttttagagttctatatgtacgtgtgtgtgtgtgtgtgtgtgtgtgtgtgtgtgtgtggtgtgtgtgtatatatatatatgtatttttttttttttgagtcatggtctcactctcgcccaagctggagggcagtgatgcgaacttgacttactgcagcctcaacctcctgggctgaagtagctgggactgcaggcatgggccaccatacctggctgattttttgttgttgtatgttttttagagacggggtctggctatgttgcccaggctggtcttgaactcctgggctcaagtagtcctcgcgccgtggcctcccagaatgctggaattacaggcgtgaaccactgcgcctgacctagaacacaatattttatacatattgaaatacctgctggattggatatacctctctgtatcagtttttattgcttttgtgtgtgtagatttttggttggttttgtgagttttatgggacttttaactgtgctttgggagatgccttgggagaaaataatgaattttgttcaattggtccttgacattttgaaagcatgaggaactgatgaattaactttcttttcgcttagaatttgacctaatattaagcttttgttcattaattatttcagtcataagtatacttaaatctgttagctgcaaagcaccgtgctggggtaagggggtgcaatagagagcaagagctttgtagggggcagataatgtattctattgctgcgtgacaaattaccccacaatttaaaggctaaaacagtacacattatctcaaattttctgtgggttaggaattcaggtgtggcttagttgggtcctcaacttcagggtcttttcacaaggttgcagtcaagatggatcatctcaaatgttgyccagacagcattcgcttcaagctcattcagttgttggcaggattcagttcctgattgcctggcaggctgttggctggaggctatcctcagtcccttgccatgtgtgcccccaacatggcttcatcaagagagagagtcttctagtaactctgaggcaacctaatcaaggaggtgacatcttgttatttttaaattttttttacttttaaattttactttcaaaattataatacagtaagttattctatcccttttgctatattctatttttagaaacaagttactaggtccagcccacacttaagggcaggggattacataggtgtaactaccaggagtaatggattattaggggccatcttagaagtctgtctaccatggatattaaatgactattttacagctatttaatctcaattgtgaaagggattccaggaaagaagggctatgagagtttatgataaggtgtataaactgccctagagtcaaggaagaacttcactgcagaagtggtttgggctgacttaaagaatgagcaggacttggctgggcgcagtggctcacgcctgtaatcccagcactttgggaggctgaggtgggcggatcacgaggtcaggaattcgagaccggcctgaccaacatgatgaaaccctgtctctactaaaaatacaaaaaaaaaaaccaaccagccagacgtggtgatgtgcacctgtaaccccagctactcaggaggctgaggcaagagaatcgcttgaacccgggaggtgaaggttgcagtgagccaagattacgccactgcacttcagcctgggtaagagagcgagactccatctcaaaaaagaaagaaagaaaaaaaagaaagaacaggacctgactaggtggagagaagagtgggaggaaatggccatataaagaccctaaagcaggagagtgccaggaaggccagggacatggtatgagcttaatgggatttggcaggggcaagattctgtatggctttacaggctttggtctatgctaagaactgtcccaagatgcaaccaaaatgtatatgattttagggactcagtggtcaaatatttatggaccaccttcaagtgtatttagaactctgtggaaggatggcacagagttctaagttacagttttaaagttatctataattcagttctcagttatctataataaatttgagagatgcaacacctacacacaaaacaactaataaagcaacccaatatatagaacaattagtgttatggctataacaataatatgtgaaatgttaaattgtgtgctacaaatacagaatggcatgtaattagctaattgtttaatattgtaatcagcaataatattgatgtgaggtataaagtgtgctacaaatacagaatggcatgtagtggcatgtaactagttaatcatgttcattctgatcattgttgggatttaggtaaggaattaatgtgattttattttatttatttattttttttgagatggagtttctctgttgcccaggctggagtgtagtggcccgatctccgctcactgcaagctccgcctctcaggttcactccgttctccctcctcagcctcccaagtagctgggactaccggcgcccgccaccatgcctggctaattttgtttttgtatttttagtagagatggtgtttcaccgtggtagccaggatggtttcgatctcctgacctcgtgatctgcccgtcttggcctcccaaagtgctgggattacaggcgtgagccaccgcgtgcccagccatgattttttttttttttttttttttttaatgatggtcagactccatgaagcaggtggcagtgccttaccatatgtgtattgtcaggcccgagggcctcttccatctttgtcaagtggagtgccaacctctcctttcgtataacacaaattcatgtgattttaatgagtgttgcttctatgattatattcaaatgtcatagttttttaaagccttttttttttttgagacggagtctcgctctctcgcccaggctggagtgcagtggcgcgatctcggcttactgcaagctctgcctcccgggttcacgccattctcctgcctcagtctcccgagtatctgggactacaggcgcccgccaccatgcccggctaaattttttgtgtttttagtagagacggggtttcatcgtgtgttagccagaatggtcttgatctcctgacctcatgatccgcccgcctcggcctcccaaaatgctgggattacaggcgtgagccaccgcgcacagccaagcctattttttttcttattttacaattgaaaacagtgattattggaatttactttgaacaagtgcattatcaaattaaatatatgagtgtcttatgttcaggatatggtgcttgacattgaaacagatggactcttgccttaaatgtagggtagtaagtaataaaaggctaatgtaatatatcagatctaaggtatatgtaaatgtgatttttaacaatttcagaagaaaggggagattgcagcaggtagagctggtctaggaagccttcttagaggaaggatgtgatttgaggctttatgttagcaaggcataggaggatgattttgttcagaaagcacaggaaagataaagtgctacttgaagagagcagttagtggttcttcctttcagtgccagattgatgagtatttgctgctttttggcagaaaacttttagcctttaattactaatgacctgcctcatttttcctttccttttcttagtgaagctattaagtacctcacagaagctcttcagtctatcagtgaattagagcttgaagataaactggaaaagataattaatgcagttgagaagcaaccctgtaagtaatattttctgataactcctaaattgttaatatagttctgcatcttcagttagatgtatagatttaaattgaagttgaggcttcactattaagatgtcccagtgttataagatgtatgcatggtagcatttcttcccaaggggtaatacctttagtttattttaatttttttttctttcttttttgggatggagtctcgctctgttgcccaggctggagtgcaatggcgctatcttggctcactgcaacccccacctcccgggttcaagcaattttcttgtctcagcctcacgagtaggtgggattacaggcacacacctccatgtcaggctaattttttgtattttagtagagatggggtttcactgtgttgctcagcctggtctcaaactcctgggctcacgcagtccacctgcctcggcctcccaaagtgctaggattacaggcgggagccaccacacccggccttttttattttaactgttgatgacatccaaacccttagtttagttggaacctcaggatgatccccaagggcccttttatagttcctttcccccagtggaggtgtcaccaccatgtttcctgcacttggcttctgattttgatctggtcctttatggtcactttgtctctcctagtggctattaccatgtcttatttaagtcattaactcctaaatgtttgggaggaaaaaaagaagagtaaagtaaacagagctgacatctcttcttgatttcttcagggattttttttttttaatagaatggctagtcattttaacttaattttgtaagtctaagttaaagggcagagacagtaacttttcaataaaaagcaattctactaatgcactgataatgaatacactaaacagagttggaaggcattttactgaaagcaaactgtagaaaatagacttttttttttttttttttttttttttccctgagaaggagtcttgcactgtcgcccaggctggaatgcagtggtgctatttcggctcactgcatcctcygcctcctgggttcaaatgattctcctgcctcagcctcccgagtagctgggattacaggtgtgcgccaccatgcctggctaatttttgtatttttagtggagacgaggtttcaccatgttggccaggctggtctcgaaccgccaacttcaggtgatcgcccacctcggcctcccaaagtgctgggattacaggcgtgagccattgtacctggtgaaaatagacattgatacaaaattatataacgcttgtgataagaataagtggggccaggcatggtggctaacacctgtaatcccagcactttgggaggccgaggctggtgggaacgcctgagttcaggagttcaaggtcagcctggacaacatggcaaaccctgtctctactaaatatacaaaaattagccaggcatggtggcaggcgcctgtaatcccagctccttgggaggctgaggcaggagaatcgcttgaacccgggaggcagaggttgcagtgagctgagattatgccactgcactccagactgggtgacagagtgagattccgtctcaaaaaaaaaaaaaaaaaagaataagtggatttcaagaaaagcacattctataaaagatggtcatttttttcttgagtataccaaagttatgaaacataaggtgacccaggaaggtagaggtttgggaactccttcaaggcatttgctttctacacactgcttccctcctctcccttttttttttttttttttggtgagagcgggacagagtctcactctgttgcctaggctggagtgcaatggcgccatctcggttcactgcaatggcgccatctcggttcactgcaatggcgccatcttggttcactgcagcctctgcctcccgggttcaagcgattcttctgtcccagcctcctgagtagctgggactacaggtgcgtgccaccacaccaggctaatttttatatttttggtagagacagggtttcaccatattggtcaggctggtgttgaactcctgacctcaggtaatccacccaccttggcctcccaaagtgctgggattacgggcgtgagccaccacacctggcccctcctctctttcttcatgttcttttttggaaagtcacatctgttgaaacatgcccaaagaagctagaatggggccaccaatacatgaactaaacctctgttycagttttttatgatttgcagtccatttcagccatatacttcggggagttttctgagacacctctctattcaacctgtcagtaaaactgtatcagcatgtttcctcttgccactgccacactgccatagggattcagggacctttttgttaaatacttaataccacaagcatgggactggaaagaagaaatgctcttccccttggaaaaaaagtctgatatttatagcaccctgaggatagaagtgggtatggctcactgtccactttatcttagcataaaaggctgagaagtgccgagttcactcttaatgttatatagatgctagtcacttcaattatataggaagaaacatactccgtgatacaggataaatggttattatatctcattttcattcctaaaggcagaattttacatatacctttgcttaaaaaattcctttacagttgaacatttagaaactgatacttgtctcacgcctgtaatcgcagcattttgggaggctgaggcgggcggatcacgaggtcaggagatcgagaccatcctggctaacacagtgaaaccccgtctctactaaaaatacaaaaaattagctgacagagcgagactccgtctcaaaaaaaaaaaaaagaaaatgatacttgtccctgtgtacattgatttaagatggcacatggtattttgcttgacaacatatcaaagtgattaaaagagcccccactggaatcagtcctgggtttttgttgctctctatctcttctagtttttgggcaaaattttcaacctcttaaagttgtattttccctatctataagatatgggcatcttaacatcagtcttacaggacatctacccagtggaataatacttgtaaataaagtactgaggatggtgccacacatttactcaatgcttaataagtggtagctgctattgttactatcatgctcattgaaactgagcagttatgatgataaagttatactaatgtaaccttattaaaactgggagcttagagaattttttttttttttgagatagtatctcactctgtgtggcccaggctggagtgccagtggcatgatcacagctcactgcagcctccacctccctgggctcaggtgatcctcccatcttggcctcctgagtatctgggactacaggcatgtgccaccacccccagctaagttttatattttttgtagagaaggggtttcaccacgttgtctgggctggtctcaaactcctgggctcgagccatcctcctgccttggcctcccaaagtgttaggattataggtgtgagccaccgaccctagctcagaaatgttcttataactaaacagggtttagaaaattaaggcatttgactgtatattaaggtattgtaactttgagtgtggaaaatgaaggtatttgagataaggcttttgttattgttctgacctaacactttttttctccaaaaactgtataatgagaatctcagtattaatatttgcaaattatttttgggaaaagagctgtctgtggaaagaactatttttttttttgtttttaaattttgactttgaaattctctyttcagtgtcatcaaacatgattgaacgatctgtggtggaagcagcagtccaggaatgcagtcagtctgttgatgaaactatgtatgtgggtacagttaacttttttcctccttggaggtgttattgagcacttatttttaattattgtcttggaaaattattagtgatcaacgtttctacagtgattactgttgttatttctgtgtgtctttttaaataatggctttctttgcaaacctcattattaaatgactcatctttactggtttttcctgggatttgaggttacagtgttgcttgtaccattcattactaacttttgctgcctacccaaccggttgatctgactttttattctgtatgctacaaatgagttgaattgaaatgaatattcagaagtataatttactttgctcttaggaaagtaccatgtccagagaagttcagcaactttacttggtcacatggtgaatggcaaatgagggtaggacctcagttttgtgactccactatgtcatgtttttaggtttaagaatttatatggcagtaattcttctgggttttatttctctgaatatccctctttcctcttgatatgatacttctatacaaattgatggcatttaactggaaggaaaacactggggaaaatgggctgagagacagttttaacattgccacttctttcctatttggggcaatggagatgattgaaaggagtcattatctttattttagtcagaagttataatcttctccctgtcagaacttataactgctaaaaaaaaaatagagaaattgaggatttttaattttacccttgcaaactcatttaaaatactrtagtgtgaccagatgcagtggcttatgcctgtaatcccagcactttgggaggccaaggtggctggatcacttgaggtcaggagttcaagaccagcctggccaacatggtgaaacccatctctactaaaaatacaaaaattagctgggcggtagtggggcgcacctgtaatcccagctacttgggaggctgagacaggagaattgcttgagcctgcgaggtggtggttacagtgagctgagatcataccactgcactctagtctgggcgacagagtgagactctgtctcaaaaaaaatacataaaataaatactggagtataatgaatgttcctaaagccatcaatagaaattcaaaatgattgtactgaagtttgattattatcctaaaatagacgttactcgttgtttaccctaaagttacctgttatttatttatttacttattttcccccacaccaatctgcattcactttattcttctgtttatacattctcttgctcccagatttggaggcagaacgtaatatgagctcaacagtcctgcacagagccatgtaccatatcgcatcagttttccttttcccaacccctattccacccccactcagtaaagccccttgtcyaggtgttgctcttgggggtaagaaagcagaaaagcaggctgggcgcagtggctcatgcccgtaatcccagcactttgggaggccgaggtgggcagatcacctgaggtcaggagttcgagaccagcctggccaacatacagcaaaaccccgtctctactaaaaaatacaaaaattagctgggcatggtggtgcatgcctgtagtcccagctatttgggaagctgaggcaggagaatcgcttgaacccgggaggcggaggttgcagtgagccaagatcgtgccactctgctccagcctggacaacagaatgagacttgtctctcaaaaaaaaaaaaataaaataaataaaataaaataaagaaagaatgggtagagattccagtgagtgatgggagcctctttccaaggcacaaggcgccaccttctcaatatggccactgctttgttcagatttgggcagtgtgctggccaggagctgggggctgcagtacctccagctgactgaggaggcaagcattgtgagggtgctgctgcaggtccacagtcatcattgaggccaggagctgccacactcctgaagaatgcgtggggctttgtgggatgctgagttggttctgcacagcaagggccacactgtcacgtttcttgaacaccatttcgtaagggccttccccaaacattgtggcatatatcacacagcccagggaccagacatcagtctgttcatcaatgacacagtgactgctcagggaagagctctagggctcagtaggagatggtgcactgctgggtcgcctagtccggcagggtcagggcctggtgggagcccttcatgtgaggcatgcttgattcatggcatccaagtgtattaaaactggctgcccctcgtctccaagcaagatagtggtgggcttcaggtccctgtgggcctaacccttggcatgaatggcctcaagccgctgtagatacccagcaggagctgaaggatttgatcctaagtcaggragttgccatcgtccttcggcctttctctccattccacagtatatctctcttaaagaacggaagcagcagctgggcctcatgcttagcaccctactccctcagacagtaagccgtgaggtaaaggatgttggggtgattgaagaggtgatgcatgtttgcttcttggctgggcctcctcccagtcctgctgctcgtgacacaggattcgcttcagggcgtagaagtgtccatcctgtaacccctccactaggtccacatggctgaacccactctcccccaggttctggatgaagaaatagctattgtcaatgatgacatttccctaagagcaggcacacagtgcatggcccatgatgtctcagtcatcctcctcaaggactgtctgaggctgccaaagggctcgtccaggatgagtgggctcttccaggcaatgcactaagcgcccagggatcatgattctcatctagagtaaacaggtcctggtgatgccagttcagcaagggtggggtcaggtgccttaaagcctcagggcacatagcaacgaccaggmtgcttcctccaaccccagcccacytttgggcagctcctgctcccacacctgtcaggcctcaaaggcagggcacagggtagtttcagaggaggtgcatggctcaggcccatccctggcctcagtgcgcagtgcctgggtcggccagcccgtactcctcactgacctggctcggctatttctgtcaggctgtttatatgttatagccagcctacatggaggtccagtggggactgaatggtaaaggatttttgtaccttcaattgtcagagagtcattatatcataccacartagaggctcttgttctcatagatgaagagatggcatgagaagttcaataacttactcagactgatctaccagaaaatagtggagcagtgtctggagtctaggttttcctcaagttcagtgattctcagccactctatacttgttacctctagggtagcatgaatcttttttgatcattttcaatttgggagataaacatgtaattttaggaaagatttttaggttgggatatttatacagtagtgctgtggaaatttttaacttcttttaaacatggttatattattaaaagtatctgaaattaaataattttttttggttttccatctctaacactatatatatattgtataagtctgaaagatatggccagaattggagggggagctctttttccattgtgtaacttttcctgggacacttctgcataacattttagatttggcagggcgcggtggctcaggcctgtaatcccagcactttgggaggccaaggcaggcagctcatgaggtcaggagtttgagaccagcctggccaacacagtgaaaacccgtctctactaaaaatacaaaaattagctgggcgtggtggagggtgcctgtaatcccagctacttgggaggctgaggcaggagaatcacttgaacccaggaggcagaggttgcagtgagctgagatcgtgccactgcactccagcctgggcgacagaactagactccatctcagacaaacaacaaacaaaaaacattttagatttttaaaattgttggggttgggcatggtggctcatgcctgtaatcccagcagtttgggaggctgaggcaggcggatcacttgaggtcaggagtttgagaccagcytggccaatatggcaaaaccctgtctctactaaaaatacaaaaattagctgggtgtggtggcacatgcctgtaatcccagctacttgagaggcgggagaatcgcttgaggccgggagraagaggttgcagtgagccaagatcacaccccagcctgggcatcagagtgagactgtctcaaaaaacaaaacaaaaacaaaaaaaataaaaaattgttggaacttaatcatatcctttaataatactgtagctcatggccgggcgcagtggctcatgcctgtaatccctgcactttgggaggctgaggtgggtggatcacctgaggttgggagttagtgaccagcctgaccaacataaagaaaccccgtctttgttaaaaatacaaaattagctgggcgtggtggtgcatgcctgtaatcccacctactcgggaggctgaggcaggagaatctcttgaaccctggaggcggaggttgtggtgagccacgatcgagccattgcactccagcctgggcaacaagagtgaaactctgtctcaaaaaaaaaaaaatactgtagctcataagagtagtacatatagggagagatttctttaagatgtgactattgtttatataattcttctttttcaacagatgaaattcttaactggaaattaacttgattaatttttttcttgagagttttggcaatgctttcttgtcccttgagatgaaaatgcacaagctaaacattttacacccattgtatttttgacactataagaaattatgggctgggcatggtggctcacatctgtaatcccagtactttgggaggccgaggtgagtggatttcctgaggtcgggagtttgagatcagcctgaccaacacggagaaaccccatctctactaaaaatacaaaattaactggacgtggtggtgcatgcctgtgatcccagctacttgggaggctgaggcaggagaatcgcttgaacccaggaggcggagcttgcagtgagctgatatcccaccattgcactctagcctggrsaacaatagcgaaactctgtcttaaaaaagaaaaagaaaaagaaaaagaaattgtgtgcctggcctgagaaaatgtgaaaagtgtgttattacaaatacttataatgcaagttatcatgttcacctagagtacttatgttttagtaaatcaggtctgtattttgtgggatgtttttcagagagcmcgttttcaatatcataggagcatttgatattccacgctttgtgtacaattcagaaagaaaaaaatttcttccgtaagtatgtcatccactgattttaaattaatttcaaatgtactttttttttcagaaggtatagtctcttgcttcacttttggctcacctttgtgtattatgatagtcaaaaataggcattctctttttctagtctgttaatgaccaaccaccctgcaccaaatttatttggaacaccaagagataaagcagagatgtttcgtgagcgatataccattttgcaccaggtaagtttggtagggggcggaggggaggatactgggtaaaatgagagaaaaggagactgtttcagtttagggaaatctcagggatatttaaagaatggaattttgtggtccaaagttggtcattcaataaactgttattaagatttctgtgattgagactgtgtagaagatacagagatgaaaaagctattttccccttaacaacaatgatgatggtaaaaatagtagttactatttaatacatgatatgccaggtagcacttaacatacattatttacctcatttaatcctcataatactaataatgtgtaaatgctattattcccattttacggatcaggaaactgaggcttaaagaagtttagtaatttgcccatagatcgtatatagtaagacaggattttaatccagcctgactctaaagccyaaccattgcctactatactttacyactttcaagtagcttacagtctatgaagttatagacatttgtgcaatacataaagtagaattttatatgtgctataaaagagatacaaacaatgtattcaatagaaaaatcaggaaaggcttcaaggaaatgatggcatttggcatggacctagattgccttaatcttgtggaaatggggaaaaggtggtgattgtgaagaaaggtacagcaaaaaatggactctgagcaggaaatgatgagaaaatcaggagtagtgtgggatcagtttggaaaggcaagtgggagccaaattgtaggagcactttggatgccacccttgggagttgggactgttctccttgtgtgaggtgctttggaataccagagaaactcggtcgcagccaggttttttgagtgcttcctccaccagcagatatggggatgacttggagtgtgagagaagtcttctaggagtctgtggtattagtcttggcataaatgatagcctggatgaaggaagtggcaaggggtgtagaatgagggcatcacactcaagcagcagaaactataacacatggtgactgtctggatgtgaaggagaagggagggggtgaagaatcagagatgagtaaggcctagagtctgagagagtagaatatagaaaaatacattaaacaggaaaaagagaatgttgtagaaggtgatagcaggttctgttttaagcatttgagttaagattgccaggagagtatcaagtgaagtgtacatctggagctatggaaagagagttggtagcaagagagagatttgggagcatctgcatagagtaaaaaatggaactgcaaggatgagaccttgggagaaagagaagtgataaaaagacaagagggaggctaggcgcagtggctcacgcctgtaatcccagcactttgggaggccgaggtgggtggatcacctgaggtcgggatttcgagaccagcctgaccaacatggagaaaccctgtctctagtaaaaatacaaaagtagtcaggcatggtggcacatgctcgtaatcccagctacttgggaggctgaggcaggagaatcgcttgaacctgggaggcggaggttatggtgagccaagatggcgccattgcactccagcctgggcaacaagagcgaaactccgtctcaaaaaaaaaaaaaaagaggggagaggatagaacttgggggccaggtgaggatggtgttatatggcagaagcacaagaaggcttcaaggaggagcagatggtcagcggtaggttaaataaaggttgaaaagaatgatcttgaggaaccagcatcctctgctgcttccattgccgacatagtgttgctaggttaatctgcccaaagtatagctctgaccacctcgtgggttttgtacagaagtctttcaaggaaattcactgcctattgaattaaatgcagattatccttaatatgtaagatcttctctcacacataattggcctaatctctgcttttcctgtagtcataatctgggctggagccaaaactgaaatatggaattattgtttctgtttctttcactacttctgtgactttgtttatcctgttgactgctcttccctcttatctccactgttgaaaccgtcctattttggaaggcttttctcagattcctcctttctggagcctgtcttgatcttcagttggatgcagtctttttcttttttatttattttatttttgatatagagtcttgctctgtcgcctaggctagagtgcagtggtgcaaacttggctcactgtaacctctgcctcctgggttcaagtgattcttcttcctcagactcccaagtagctgggattataggcacataccaccacacccagttaacttttttattttagtagagacggggtttcaccatgttggccaggctggtctcgaactcctgacctcaagtgatctgcccacctcagcctcccaaagtgctgggattacaggcatgagccaccatgcccagctgaatctctttctgcttgaacccagtagtacgtctttttttttttttttttttttctgaggcagagtcttactctgttgcccaggcttgagtgcagtggcgcaatcccggctcactgcaacttccgcctcctgggttcaagcgattctcctgcctcagcctcccgagtagctgggactataggcatgtgccaaagcgcctggctaattttttgtatttttagtagagatgggtttcactgtgttagccagaatggtctccatctcctgacctcgtgatccacccgcctcggcctcccaaagtgttaggatcacaagcgtgagccactgtgcccarctcagtagtacgtcttttatgtcactgactggacttggccctgccttgcatttgaggtgcttatccctgtgatcagactgtggattcgttgtttatctcctgtgccacatttggcactgtcctttatacagagaaggtgctcagtaaacaccacatttcttttttcttaagtatgttttgaagtctactctgttatggtgggtgtgccacttatcccttctgagcctcgtttattcatctgtgaaataaacaggttgaagttcagtccatccatattttcattgcaattatcttccagaaaatgaatctgatgttatcattatcctacttcaaaatctttgtttctcattgtctataggacaaacttcttggctgggcatacgaagtttgtattgtcagggctttttgagctggaggttacagaaactcaaatagattaaaactgaaaaaggaatatattggcttagcttgtattatgaagtctagaagtccaccagtttcaagcctggctggattcaggtgctcacacaatatcaggaggcatctgtctctttccatgtcccacctcttttaaaaaattgattttactttcaaataggttctccctataaagtgacaaagatctccactagtagccttagcaactcttggaaagagagttcctcttttctaatagctctagcaaaagtcttgaatctgtctcttttgagcctaccttgaagcacttgctcatccttgaaccaatcactggccaaaggatggagtactttcattttctagaccttgaattcctatctatagaagggggaaggggtatcaatcctacctaaactatatggactgagagttggggagggaagtatctccacatggatcttattaatctctggccttgtctcatgttctaccttgtgcaccgcataattcaactgtattaaactttgcatagcttcctaaatactctaactcttataatttctctgcctgaaatgtctttttttttttttttttttttttttttggagacacagtttcgctcttgttgcccaggctggagtgcagtggcacgatctcagctcactgcaacctctgcctcctggattcaagcaattctcctgcctcagcctcctgagtagctgggattacaggcacctgccaccacacccagctaatttttgtatttttggtagagacgtggtttcactatgttggccaggctggtctcgaactcctgacctcaggtgatccgccctcctcgacctcccaaagtgctgggattacaggtgtgagccaccgcgcctggccctgaaatgtcttatctcagactccttttgtttcttactacccaaatcttatttatcatctgggctgttgttcagtggcccctttggcctggggtacagtcagccctcacagaactttgttgtgtggtggcacttctctttcactagccccaatgctctcagggtgacacttggttgttcttcatatcctcagcctacaatgtgctgctgccatacacacaatagacctttaaaatttttacattttttttgtyttaaattttaaaacttacattactagatatttgtatgttaaattatgtgggttttcaaatttgtggagartaagtaatagtgacattagtttaaggacagtgtttcatcagggyactattttaatgaatcttatatttaaatgtctgtttcaggaattcatgtgaatctttcttttttatagaggacccacaggcatgaattatttactcctccggtgataggttctcaccctgatgaaagcggaagcaaattccaggttagaacattatcctagttatgtagggggtataagtgtgtaagtttaatatttgttgcttaattctaattcattgaattttaaatgaaaataaactattggtaactgtttagctaactggatgggctgcatgcccacttttgatacagtccattcctagagtcctgtgtcccacaaatctctaacagaagctactgcttcctttgagaaggccctgatacgatgctagccccagatacactctggcctccaaggtagattcctagctcatttggatactacactggctttctgataacttttcaacatttcttttcttgccctcactcatcccttagtgaccataacactaaggaactcaaatgctggttccttgcccaactcatccctcagtgaccaccacacacagttattgaactagaatgtgttatattggttgaagtgaaaacttaaggtactaaggaaacaacatttatagaatgaataagagaacacaaatgggtcccacaacctggccaacatagyaagacctcatctttataaacaataaaaaacattagccaggcgtgatgttgtgcacctgtggtcccagctactggagaggctgaggtgggaggattacttgagcttgggaggttgaggctgcagtgagctgagatcatgccacygtactccagcctgggtgacagtgtaaggacccctctcaaacaaacaaacaaaacttttattagagtataaattagattttagaaattgacattacttatatttccctaccaaagatcatctatatgttttctatattaggttttctctggcaactgagatgcccacagcccaggagccttttcccttttctcctctttgacaaagtaattttaaggcttaactaaataattattcttttcaaactgtcttaattctgtatctgtgatggcacattccctacttaaattacatttatcwacctgtataatatccttttaccaattgcaaaaatgatgtgctaaaaaatactgttatttttacttctcttgtgttgttttaggttcttttttttttttttcttttgatagagacatggggtcttgtcatgttgcccaggctggtcttgaactcctggcctcaagtgatcctcctgccccagcctcctgagtagcttggacaataggtgtgcaccactactcttagctaggttcttttgccttcccttcccccttcccccttcctccttccctttcctttcctttctttctggcagagtcttgctctgtcacccaggctgtagttcagtagtgcgatcttggctcactgcaacctccgcttcccaggttcaagcaattctgcctcagcctcttgagtagctgggacatacgtgcacaccaccatgcccaactaatttttttgtatttttagtagagatggggttttgccatgttggccaggctggtcttgaactcctgacctcaagtgatccgcccgcctcagcctcccaaagtgctgggattacaggcgtgaaccaccacgcccagtccttggttcatattttttaagagtaactccagtattaaatgttaatgtgattattatggaatgatgggattatataagtttttatttttttcttgtctatattttaaatttttttctatagtaaacatgaattatttgtaataagaaaacataaagataaaacgtaaagataaaagaagctccacttggtaatttctataaatatgaaaacttatatatccttttatctagcaattgtgtttctagaatgtgtagaactttattcaacagttattatctgtagctggatgcagtggctagtgcctgtaatcttggtgactcagggggctgaggtggaaggatcacttgagcccagtttaaggctgcagtgaggtatgagagtgccactgcactccagcctgggcaatgtgaaaccccatctcaaaaaaaaaaaaaaaagtttctatctgtgtagtgggccaagaaagttgcacagaaatattaaacattgtttttattagtagaaaactgggaacaacttaaatgtcctttaataggagtttggtgaaataaatggtcatatgtataatatagatatctctattctttaaacagaaggaaatctatatgtagaaaaatggaaagatgtctcagataatattaacttcaattagttaagttgcagaatagtacatatactatgatttcatctttgtaaataaactgtataggtgtgtgttataaattatatatgtatgtatttacatatatttaggattacatatagaaaaagatggaaagttttttgttttttttgttttttttttgagacagagtcttgctctgtcacccaggctggaatgcaaggcgatctcggcttactgcaagctccgcctcccgggttcacaccattctcctgcctcagcctcccgagtagctgggactacaggcgcctgccaccatgcctggctaattttttgtatttttagtagagacaggatttcaccatggtcttgatcttctgacctcgtgatccgcctgcctcggcctcccaaagtgctgggattacaggcgtgagccactgcacctggccggaaaggattttttacaatagtgtcccaatttttactaccttaaactttctgattagaaaaaaagatcagattgagaatgtaaataataatgagagccttttaaaatactaagtaaaattggaatatatatttttaaatagcttgctagttttcaaaaggtactgttcaaagaaaataaaattgatattcttttctatatttaaaaaataaatgtacttatcattattcagaatgatatggtgtgaggattcagtcattggtaagagcctgagtcgatgtggtgtttctttaggcatcatacacttgatcttacagcttttttgtaggacaaaattaaacatcctragtttaattttacaactttatttccattttatttgattttctactgtaaagtagctataaatgctgaaatgtrtaccccaaatatagttatttataaaaagttttgtttcttgaaagaatatatttacagtctttaaaatttattttgttttattttagcttaaaacaatagaaaccttattgggtagtacaaccaaaatcggagatgcgattgttcttggaatgataacrcarttaaaagaggtaacttaataagcrtcaaacttttatttttggccttggattgatgaaatgtcggttacatagaacatttttgtagtgggcacaggaatgtattctttattgaaaactcgcctcaccaacagaacaatattggaatagtggtaatacgaggaaatagtatcatcatgtcagaagccttggaacaaggataaataatggctgttggctgggcgcggtggctcacgcctgtaatcctagccactttgggaggctgaggtgggcggatcacctgaggccgggagttcaagaccagcctgaccaacatggagaaaccctgtctctactaaaaatacaaaattagccaggcgtggtggcacatgcctgtaatcccagctactcaggaggctgaggcagaagaattccttgaactcgggaggtggaggttgtagtgagctgagatggtgccattgcactgtagcctgggcaacaagagcgaaactttgtctcaaaaataaataaataaataaaataataatggctgttcagcagagaaacccattttctctctccatagggcctgttttacaatgacgtaaaaattaggtcatgtacattttcatattagactttttgttaaataaacttttgtaatagtaaaaaaaaaaaaaaaaaacccagaaaaaacaaaaaccttttctcagtcaccaagtgtctttttcatctgtgtttggtttcctgagaagacatcaggacagagtgtcttgtgcaggagcccagtttgcatagcctgaaattaggccygtagtgacctctggataaacggagagtactgggtttctgaacaagcaagctgcagagtatgtcctggtcccttggacatgctgttggctgtcttagaaggtacctggggagaccctccttatggcagacatcaaatgtccctcttgccatttcttatctgtaggagtcattctccattgtacctgtgaggagtcagaatctcagttaagtgattagtctggggttatcagactagtaaatggaagagcctggactagaaataatagctgatttttaaaatccactttctccctattgtattctgttgtcaaacttgtagtttaatttttttgtcarcggttttcattgttacataaatgtggatttatttattttcatttttttagggaaaattttttctggaagatcctactggaacagtmcaactagaccttagtaaagctatatccttcacttgtctgtattttttaaaatctgcattacgtgaattggggaaattgattatatatccttctaaaatttacctatttgggttctcartgtaacttctctatgttgctggtgtaggaatgtagagatataatcctaaacagggacagaacaactttaattttctcttatttggagaatctagatgaatcactgacgaaatttatatcatggtaagaatgatccaccctgtcaatattaccaagaattaaacatgaggacatttaaaactaaaattttttaagctctttctaagctgtggtctattcacagtttcaaatgggaagtctttaaatttattatttagaagccttgttggactcaaaatgtatgttgactttattactgcctcaagaatagaattattttcctcaactgttgtgtaccagttccatagtggtttatacacagaggcatgctttgtcttagcagaaggtaagtcagtatactttgttactgtccttcttctcattctccagtaaaactttctgctttgggtaaaatatgttaacatgatataatttgggataccattaattagaagagcatatttttggcaaaataactcttagactgttaatgggctaatagaaatctttttggggtgatgaaaatgttctgaaattagatagtagtaatggctacacaacttgtgaatatactaaaaatcaccgaattacacacccttttttttttttttcttttttttttggagacagagtctcactctgtcacctaggctggagtgcagtggcgcgatctcggctcactgcaacctccgcctcccgggttcaagtgattctcatgcctcagccttccgagtagctgagattataggcgcatgccaccatgcctagctaattttttgtattttagtagagacggggtttcaccatgttgcccaggctggtttcaaactcctgagctcaggcagtccacccgcctcggcctcccaaagtgttgggattacaggcgtgagccaccatgcccggcctgaattatatactttttttttttttcttttgagatggagtctcactctgtcacccaggctggagtgcaatggcacgatctcggctcactgcaagctctgcctcccgggttcacaccattctcctgcctcagcctccctaatagctgggactacaggcgcctgccactacgcctggctaatttttttttatttttgtatttttagtagagacggggtttcactgtgttagccaggatggtctcgatctcctgaccttgtgatccgcccgcctcagcctcccaaagtgctgggattacaggcatgagccactgcacccggccctgaattatatatttttaaagggtgaattgtatagtatgtgaacgatacctcaataaagttgaaaaaaacacttaattttatatagggccataaaatgaaacatttcctaatctgtatcaacacgtactgccaaactgaaaagtgaaaagttctgaatctatttctatttaatgaattttataagttgagactctctgtggatctaaagttgttcactgtggttcattgaggttggcaacctctgtaattagttcacagggcatgagactagcctggcattattgctttgttgtaacataattttgtcctttcaaacatagaggattagacaaatgaaagtgacgttactttttttcaggttggtttgaagatcaagtgtttcatgtcaatgcctttggatttccacccactgagccctctagtactactaggtattaaaatgtttggtttatactctatgggaatttggtaatactggcaggagtgaatgtaagatagtacgtcatatctcagttactaaaargtgtcaggctttgtgtcaaaatggaaaaagcaatggaaaatgagaattagaagactgggttttgtatgtaatgtgaaaactagcagattggccaacaattagttgcaataccgtctttgtacttcggctttaactgggaaagatttccagtctgttttatctctggggttgatgagaagttgaagtgagataagacaactaggataacacttagaagaatataattccatgttaatataaaattctcatttttatattccaatgaatgaaagttatgtgaggtagcttatagctccttaatataagtgaaagcatcataatattagagctattccaaaatggccttctcttagaggagctgagctccctgtcacttgaattatttgggcagarcctgaatgatagtataaaaattgtacttggtgkcccatgggttgaaagtagtttatagacctttcttttcttctccccactttgaggtgtttaaaaacatttcgagttagtttccagtgtataaaaactagaagatttctcataaaggcctaggtttcagagttctcttaacaggaggatctggcaatacagagcctgaattctcacacagcaaaaactaaactgcagtggttgcccactttgggcagggcatgtatgtgtgccctagttagtgtcagtggactgctgctttgctatttagtgttatcttcctggagcctgtaagcatttgagtttgccacctctgggggaattaaagtagttgccttctaaccatgagattctgtataatggtgatgatttcaaaaggaagcataaagattaagattttagttttaccaggaggcagaggttgcagtgagccgagatcgcaccactgtactccagcctggcaacagagcgagactccgtctcaacaacaacaacaaggattttagttttagtatgcctgtataaattcaaggtgcaaaggcaacatttcctggctgggagtttactggcagggcggcctgtgcagagcatctactcttgctgttgaagtaactgagggaaaggtgctgatcttgctaaggagaacacaagccctaatcaagccaagctcacctctatttgagtgcttttggtgcagtttgtggcttttttccaatatggtaagtttcctttggaatatatttagagcaaaattgccattgtcatggtatttttgttttgtacaagcttcaaaattactactttggaatgagaggtatagttgagttggctggctgtgagtttaccatttgtttctctttagccaagagatcattattataatgtttcaaataattttccacttaaattataccattttctctaaatccaactgcttagtatatgcttagtaaaccaaaggattggtatgaggtgtaataaagtacattaaaataaaatgatcattttattcttgttaggattataaattttctctaaaatgccttcaaaatataaaattcagggggctaaatctggtggtagtcaatcaattcaacaactaatattttagtgagtatgttttatgtgtaaaatactgttttacaaataagtgcaaataggtctacagcatggtcctatcctaaagagatttacactgactcaataccctccctaccattgtgtagttaatgcaaataatttttttttaaayggaagatgtgagtaaggcttttctgaagtttaatttctcaatatttagcttaataggtgtttctgtgatgctctgatttatgtttgggtatatgcttaactgaaatcatcatacaattatgtctacttactgcattcctctagcaactataaaattattaytgtacctttgaaaatgccagttggtccacttggtgggaacaataacaatatcagttaccatatctaagggctcacaccgtactaagcactgtgccctgtgggctttctgtacattatcacttgtattccttctagtaaccctgtgcagtagatatcagtttagtttttttttgcatttgaagagttaggttaagaagtgtcgatttgggaggctgaggtgggtggatcgcttgagctttggagttcagaactagcctgggcaacatggtgaaaccctgtctctattaaaaatacaaaaattagccaggtgtggtggcatgcggttgtagtcccagctacttgggtgagagaatcgcttgaactttggaggcggaggttgcagtgagctgagatcctgccactgcactccaccctgggtgacacactgagactttgtccccctaccccccaaaaaagaagggttgggtaatttgtccatggtcacaaactttttttaagacggagttttgctctygttgcccaggctggagtgcaatggcaccatcttggctcaccacaacctctacttcccggtttcaagtgattctcctgccttagcctcccaagtagctgggattacaggcatgtgccaccacactcagctaattttgtatttttagtagagacagggtttcgctatgttggtcaggctggtcttgaactcccgacctcaggtgatccactggcctcrgcctcccagagggaggctgggattataggtgtgagccactgtgcctggcccaaactttttattgttagagatgtgctttgatcccaaggtttccgactcaagccagtatgctgcattggaaaagtagttgagtctttaaaaaaagaaaagttttttcttattaataatgtagttcatgattgcaaaaaaaaaaattagaaaatatatgaaggcacacaaaaggaaaggaaaatcacctgtaattttactaaacagaaaaaaactgttaacattactttatatatgtatatacagttgtgtattgcataacaacggggatacatcctgagaaatgtgttgttaggtgattatgtcactgtgcaaacatcacagtgtacttatacaaacctagatgatatagcccactgtacaccaaggctgtatggtacagcctgttgcttctgtgctacaaacctgtgtgacacgttgctgtattgaatactataggcaactgtaacacaatgataagtatttgtctctctagatacagaaaagataaagtaaaaatatggtataaaatataaaattggtacacctgtatggaacacttatcatgaatggaacttgcagggctggaagttgctctgagtgagtcagtgagtgagtagtgagtgaatttgaaggcctaggacattactgtacactactgtaggctattaacactgtatacttaggctacactaaatttgtttaaaaagagttttctttcttcagtaagaaattaacctagcctgggcacagtggctcacacctataatcaatcctagcactttgggaggctgaagggagtgttgcttaaggccaggagtttgagaccagtctagacaacataacaaaacctcatctctaccaacaacaacaacaacaaaattagctgggtgtggcagtgtgtacctgtagtcctagctacttggcaagctgaagtggcagcattgcttgagcccaggagttaaaggctgctgtgaattatcattgtgccactatacttcagccagagtgacaaaggaagaccctgtcttgaaataaaaattttttaataaaattaattaactttagttactataacattctttataacctttaaaaaattttaaatttttgactctttttgtaataaacagcttaaaacacaaacacattctacagctgcacaaaaattgtttctttgtatcctgattttgtragcttttttcttttattgattaattgatttactgatacaactgtactctcttcttcaggctggaatgcagtgatatgattatagctcactgcaacctcaaattcctggacataagtgttcctcctgcctcagcttcccaagtagctaagactgctaattaaaaaaaaaaaattgtgtagggattggtgggggtcttcactatgttgctcaggctggtctcgaactcctggcctcaagcaatcctcccacctcagcctcccaaagtactgtgattacaggcatgagccactgtgcccagccacttttttccatctttatattttctaaaaatcttttttgttaaaaactaaaacaagtgtattaacctaggcctatacacagaatcatcagtatcactgtttttcatctccacatcttgtccactggaaagtcttcaggggcaataattcatggagctgccatctgtagtaacaatgcgttcttcttgaaggacctcctgaaggacctgcctgaggctgttttacagttaaaaaaaaaagtagaaggactacactctaaaataatgattaaaagtacagtaaatacataaactagtaacatagtcatttattattgttatcaagtgttacatattgtacattattatatgtgctgtactttcctacaactggcagctcagtaggttgtatacaccagtgtctctacagacacagtaatgtgtggcactaggacattgtgacagctaagatgtcagtaggcaataagagcttttcagttccattatcattctgtgaaaccactcatatatgcagtccgtcattgccaaaacgtttttatgcygtgcatgacagtccatatgtagtagatcctcattaatttacagatttgtgctaaaatgtttttgtacctcctaaagtcaatactaaaggtgctttagtggtcatttatgcttagcagaacagcaaaaaattttgagtcacctggcatgcatgttcccagctgaagtcgaacaggccatactgccttcttgtttcagcctcattaagagatgaccagaggggccgggcgcggtggctcaggcctgtaatcccagtactttgggaagcctaggcgggcggatcacgaggtcaggagatcgagaccatcctggctaacacgatgaaaccctgtctttactaaaactacaaaaaattagccgggcgtggtggcaggtgcctgtagtcccagctacttgggaggctggggcaggagaatggcatgaacccgggaggcagagcttgcagtgagccgagatcatgccattgcactccagcctgggggacagagcgagactctgtctcaaaagaaaaaaaaaaaaagatgaccagaggacagagactgcagggagcagtacagggtagtgcaagaagctctggccctggggccagttttgtgtggggagggggcatttgaatctcacctctggcacctgtttttggagcaacctcagataagtcacttaacatttctgaaccaacttttctcatttgtaaaaatagaatctaccaggataaattggttttaggacttaagactataatcaatccatgtatatataagtacaaattttcccaaggagcartggttcagtgtttgccaattcattgtttgtggagattttatagaacataatatcactaataacaagaatcaactggctgggcgtggtggctcatgcctgtaatcccagcacttcggaagggcgaggagggtgaatcatttgaggtcaggagttcaagaccagcctagccaacatggtgaaaccccatctctactaaaaatacaaaattggctggatgcggtggcatgtgcctgtaatcccagctactcaggaggctgaggcaggagaattgcttgaacccgggagatgaaggttgcagtgwgctgagatcgcaccgctgcagcactgcactccagcctgggagacagcatgagactccgtcaaaaaaaagaaaaaaaaaaaaaaggaatcaactataacaagatatgtatgtgtatatctggagagtttctttttatgcatgaatgcacaggtctatatctattccctttttttggcattataaatggatacatactgtaccttgctttgtaacctgtgtttttcatctaataatatgctatcaacattttctattactgtgaaatattgttttatagcatgattcgtgacattcaggaaatatgttttgagcacatactgtattgccactaggtggggagacagacatgaaacaatcgcccaattacaattggctgactacaatttttttttttttttttgaggcraaatcttgctttgttgcccaagctggagtgcagtggcatgatctcggcttactacaacctccatctcctaggttcaagcgattctcctgcctcagcctcccgagtagctggaattataggtgcctgctgccatgcccggctaattttcacatttttaatagagatggggtggatttcaccatgttggtcaggctggttttgaactcctgacctcaagcaatccccccacctcggcctcccaaagtgctgggattataggtgtgagccaccctggcctgattacaaatttgataagatctgcaaaggagaagtacaggttcctatgagagtgtataatgggaaaatctaacctcttttgggatcctcagaggaggcctatggggtatttgcatttaagctgggaactgcaggatgtcagtgtagagtgggcaagagtggtggaggctgggagtgtgtagattacccactttcctactgacccttgcttggtgagcattgaataaaaccaagctttgaaggaaccgttgaataattttttcacagttcttggatataggctagtctttgtatatatctttaattccttaggattagccattccagaagtagaattacttgggcagatggttagcacatattttgaggtttctatgagatattgttcaaatggtgtactcatttcttctactttcagtgacataggaaattattattttaatgtttgctttagtcagtttttttkttttttttttgagacaagagtctcactgtcgcccaggttggagtgcagtggcgcaatctcggctcactgcaggctccgccccccggggttcacgccattctcctgtctcatcctccagagtagctgggactacaggcgcccgccacgtcgcccggctaattttttgtattgttagtagagatggggtttcactgtgttagccaggatggtctcgatctcctgacctcgtgatccgcccgcctcggcctcccaaagtactgggattacaggcgtgagccaccgtgcccggccgtttagtcagttttaagacacagatatagcctattattttatttactgcttccatattgcttatcttgttttagaatatttagataacctttgtacttttaaagtgttacaaagagtacctttttacactggaaaataacttcattagatacaaagaagctaaatgtatacaactattagaaaaatatctctagtggtatatagaagataattatgttataattatctagggcatactatggaaatattaatttttttggaggtccttctaatacatctgtgaagacttctgcaaaactaaaacagctagaagaggagaataaagatgctatgtttgtgtttttatctgatgtttggttggaccaggtggaagtattggaaaaacttcgcataatgtttgctggtaggtcttattttttttcttctttcttgaactcttttaagggttcatgttttaaaactttttgagtattctatttatctttttgagtattctatttaaaaaaaaacagagttagcaatgagataatttarattagatttcattttaaagacttaaatttttacattaagaaaaaaacctgtgtgtgtgtgtgtgtgtgtgtgtgtgtgtgtttatagtcatgataagtaagaattagtcctgaagttcaagaccagctggacaacatagtgagaccccatctctaaacaaaaacaaaaacaaactgggtttaagtgcaagcctattaccctgggcaggttacttaacctaagtctcagattttatggatgttctgaggagtaattaagccaatgcaggcctggcctatagtaagtgctcaatgaatggctactgttattagtattattttaataagttattaaaatgttattttaattaaaataaatttttattattagaaagtcatggttaaagggtttttaacttgatttgtagactagaaaagtattgttcatttactcttttattgtttaggttattcaccagcacctccaacctgctttattctgtgtggtaatttttcatctgcaccatatggaaaaaatcaagttcaagctttgaaaggtattaacgatctatttaataagaagtgtttctatagtcatataaactaaagtaataagaaattatccataatattttaattaagaatatacaggattgtatctaatcaaatataattttatggcattatatgcaaatttaattcaatacctttttaaaattttagattccctaaaaactttggcagatataatatgtgaatacccagatattcaccaaaggtaatgatctctagcactatatattttttcaccgttttacttaaaaaaaaaacaaaaaatgaattttgttatatcagcaattattacaaaactaaggaagaaagataaagttgagaaaattaaaagaactaagagataaagttatcctcacattgtactagaggtttataatgaaaagtattgaaagggatagaggtaatttcagccatacttggaatttcttcgtggcattactcttaagagtctagagcttcactctccgatatgatagtcactggccacatgtctctttaaatctaagtttaattaaatttaaatataaaattcagtccatcagctatgctagccacaattcaagtgttcaattgggcagtgcagatatagaacttttctatcatgacattactagacagtgttggtctggagacttaatagttcatttattataatgcatgaaatttaaatgttttttaattttaaagagaaaacaaagggaataacttgcttttaagctattggatagtgttacaataatatttttaaatgaattgtgttgaattttgctacagtagtcgttttgtgtttgtacctggtccagaggatcctggatttggttccatcttaccaaggtaagttttgttcaratttttgcaacagtgtagaaaattttgtaaaacttaaaaagataaactatatcacataaattgtttttataggccaccacttgctgaaagcatcactaatgaattcagacaaagggtaccattttcagtttttactactaatccttgcaggtaagaattagtattttgtgttatacatttttcctttcatttaaaaattagccaggtgtggtggctcatgtctgtaatctcagcactttgggaggccgaggcaggcaggttgcttggagttccgagaccagctttggcaacacagtgaaacccatctctacaaaaagtacaaaaattagctgggcttggtggcacgcgcctgtggttctactgaagaggctgagatgggaggatcacttgagcctggtaggtggagaggttgctgtgagctgagaatgcactactgcattccagcctgcagcctgggcgacagagcaagaccctgtctcaaaaaaacaaaaaacaaaaaaacaaaaaaaacaaaaaacaaaaaaactaacttgattcctaaaatgtgtctctgaatttcgactgttatggaataaatataagaagaaaatttatttttgttttaggtttctcaaaactttgaaaatagtttaactatatttaaataatttattggtagtcaattcagactcttgaataatggatagcagtttaaaaatagatattattactacatatcctttaagaaaggttacaaaggaagaatacaaagattacttatttactgttcgtattgctcattgtaatcataagttcttcctgtgggaataccatcagaggcagccttggttcgcctcttttctgcctacattcactcctttgctggccttctccagtgtcctctggctttaagtatcatctgtgtattgacaccttccacatttatatttccacttcaacctaccttccaaactccagactcaggtatccagttgcctacttatcaccatcccaacctaagtgaactcctgatcttcctccccacgagtgtccctaacctcttctgtagacttctccatgttagttcatgacaccttcatggtctgaacaatgattattccagttgttcaggccaaacactttggggtttctctcacatgttttttcaggaagtcccattaacttcaaattatatccagaatctgctctctctctatacctctacctccacaaccctctaccacagtggtccccaacctttttggcaccagggactgatcttatgggagacagacgccagggggggtgggggtgattttgggatgattcaagcgtattacacttattgtgcactttatttctattattattacattataatatataataaaacaattatacaacttaccataatatagaatcagtaggagccctaagcttgttttcctgaaaccagacggtcccatctggggatgatgggagacagtgacagatcatcagacattagattcttataacgagtgtgcagcctagatcactcacgtgtacagttcacaacaggattcgtgctcctgtgagaatctaatgcccctgctgatctgacaggaggcagaggtcaggatgtaatacaaccgatggggagtggctgtaaatacagatgaagctttgcttgcttgcagcctgctgctcacctcctgctgtgtggtccagttcctaacagaccatggactggtaccagtccatggcctggaggttgaggagccctgctctgccatcttctcggcctggattattacaatagcctcctaattggtctccagcttttactccttcccctccgtattctattcttaacgcagtgtgaaagtgatcctgtaaagcataaggcatatcccatccaccttcccgatcctggaaaaagggaccctcattggaaaaagggacccctcgtgatttagtgacagccgtatccttgcagtggtaatcaaggccctgtgttatctggctccgttacctctctgatttcctctcctccccatttactccagccacactagcctcccttctgttcctcaaggatgccaggcgagctccagtctgagggcctgggctccatctgttccctttgcctgcagtgcgcttcctctgggtatctgcttgactaagtccctcttccgcttcaagcctgtgctcaagtcacactaaattatgagcccggcctgttctgatcatcctattaatatgcccgccttctaggctctctcttaccacatatgctgtccctcttagcctgtctttttctttttctcttatgcttaattatcttaaaacatactatatgattatgttcgctttttattttctcagccccaccccctactagaatgtaaactgtatgagggctgggatcttttggttctgttcgctaatccctagaatggggtaggcatatattaagagctcaatacatagctgttaaatgaatagatgaatagacagactctggttgaagttttgtgtggtgaacagtgaatgtgggaatggggttgtattgtaagagattttacctttaaaattaatatcatttttttctgagaagtcaaattcaactactgttttcatttcagaattcagtactgtacacaggaaattactgtcttccgtgaagacttagtaaataaaatgtgcagaaactgcgtccgttttcctagcagcaatttggctattcctaatcacgtaagtgaaacaacttttttattaaactgccttacwtgttgcattatataaaattttattaagccacttaataatttgtccttgggttaggacatttatttatggttcaaaatagtttgaacgtacttttgtcagtaagttaatttttgttagtgaagtcagtgtttctcagctttctacctaagtgtatgtcctttagaggacagagaaaagctgagaataagcatgaaatttctttcaagcttcgtgttttgccttttaaactcttaaattatacttgaaaatatatgtatatttgttttaataaactgttcttatttatcccattggttacatattttatatagtatgtccatatcacaagaatgtgcagtatttatcttgtagcttcgaggttccctgacaatagttgtcaatcacaggttacatacacccccatttgagaagtacggaaatagatgttacagagcatttttattattcattttataatatttaaagtttatggaccaggtgcagtggcttatgcctgtaatcccagcactttgggtggcttgcttgaggccaggagtttgagaccagcctgggcagcataatgatgtatatgttattaaatgaaaactcatagattttttttcctaaaatacagaatagtttatttcacttttaaattagtgtctcccaaagctctgtgagtcaaagctttcctagtttctcaaattttctggttccttttggtaattaatatttaatttgaaattatttgtttagctattttcacttttgcaaatgaactgaagtttgctttgttttgtgctcttttgtagtttgtaaagactatcttatcccaaggacatctgactcccctacctstttatgtctgcccagtgtattgggcatatgactatgctttgagagtgyatcctgtgcccgatctacttgtcattgcagacaaatatgatcctttcactacgacaaataccgaatgcctctgcataaaccctgtaagaatgtagttaatcttatatagtcattatytatcaagattagagtgcattttttaatttaaaaatatatatttaataagattattgtcgaagtaaaaatatgctattagtgaaacaytgaattaagtttctatacacagaaagttggtatacacagaaagttcttaaactttcagtatagtgactataaagtaacatgacttaaaaaacaaaaaaacaagcataccmacaagcataccaaaacataaatccaaaagagtaattttctcctcttcagaacttatcttgggattcctttctgggaattgcttcagagcctgcatattggtggtacttgtcctttgagaatgattttgatttttggaaattgcacaggtcccaaaaatctaagcctgattaatatagaaacctcattggtacatattttattacttaattttatgtagaaccttgaaattgcttcagaatcttgaggttgcttcagaatttctgcagaaatataattgacttttaggccaggtrtggtggctcacacctgtaatcccagcactttgggaggccgaggtgggtggatcacgaggtcaggagttcaagaccagcctgaccaacatggtgaaaccccgtctctactaaaaattacaataattagctgggcgtggtggtgcgcgcctgtaatcccacctacttgggaggctgaggcaggagaattgcttgaaccagggaggcagaggttgcagtgagcggagatcacgccattgcactccagcctgggcgacagagcgagactccatctcaaaaaaaaagaaaagaaatataggccgggtgtggtggctcacgcctgtaatcccagcactttgggaggccaaggcgggcagatcacgaggtcaggagatcgagaccatcctggctaacatggtgcaaccccgtctctactaaaaacacaaaaaattagctgggcgaggtggcgggcgcctctagtcccagctactcgggaggctgaggtaggagaatggcgtgaacccgggagacagagcttgtagtgagccaagatcgcgccactgcactccagcctgggcagctgagcgagactgcgtctcaaaaaaaaaaaaaaaaaaaaaaaaaaagggaaagaaatataattgactttttgaacttggagaataaatactgcataaacaatgacataaacacagttatgtcaaacaaaatattatctccactagagatttttaatatgcatgcttccttgattcttgtgaattttagactttactaattttttgtttcatctgagtaatttctagaaacatcatgccttatttttggcatgatgctgggcctgtaatcccagcactttgggaggccgaggcaggaagatggcttgagtccaggagttcacaaccagcatgggcaacatagaaagggcctgtctctactttgctttcctcaaacacacagtttgtccagcttcttctaagacatggcttatcggccttggcacttttgacattttggaccaagtaatttttggtggtgggggctatcctgtgcattgtaagctgtttagcagcatccctggcctctgtccactaaatgccagtagtattccccagctgtaacaatcagaaatgtctccagacactggccaaatgtccccctgagggacaaaggaaccctggttaagagcctctgctttaagaatgaacacagttaactgatttggttttattgcttagaaatttatgacctgatttttattcacattgaaatagtctttcatggtgatgctatttccttacttaaactttgggcattctcctagttaatgctctatttgaatataccttatttctgaatttttctactttttcatccctgtgagtaaaccaccacctcctacaccatcattatatcttttttaccttatttataccttttgggcaagctcaaaactagccttagacattacttcatcctttcttgatatttattcacattaacgaatgcctgccataggctaggtgttgggttcggtgcttggggcacaaagactgaaaagacagggcctctgctcagccacgtgagagtttcatagtagacaaacaattgtatgtgtgattattgctcagttgctttacakgcacataggaagggaatcaaacaggtacataggaatgcmaatcagttttgcattagagagaggggcaggaaagacttcttgaacttgctgattgtctcacatgcatatttggcgttacacagtctgtttattttttacactaagtagagctcctcctaagcatttccaacctcatcttttagcattaagactgtctagccaactcaaaagacttttgcttcaagtggagatattttatagtaacaactctgtaaaaagatcgtgtaaaaatctgttgtgttactttatagtcacatcttgtcattttaagtcacaaccaaggacttttaaaaaacaggaattattttataaaacttgagtattcggctgggcacggtggctcatgcctgtaatcccagcactctgagaggccgaggtgagcagatcacctgtgcccaagagttcaagactagcctgggcaacacagtgaaaccctgtccmtctttacaaaaaatacaaaaattagctaggcgtggtggcccatgcctgtggtcccagctacctgggaggctgagatgggaagatcgcttgaatcccggaartggaggttgcagtgagattgccccactgcactccagcctgggtgatgagagtgagaccatgtctcaaaaaaaaaataaataaataaaataaaaaataaaaaatatacatattgtgtttaaaaaaatttattttaaaaaaagtctgagcattcacttacaggcatttttctcccccaaagggctcttttccaagaagtggattttcattcaaagttttttatccttctaataagacagtagaagataggtaagtgtgtgcacagacacagcaagaaagatctttctctaggtgttaaattactgaaaatgagatgttctatcagtgtgttgggatttttgaaamtgtctacagtggcccataaagaaatattattggctgagcttatcacggttatgctgtgtgacacagaattgtgggtacatgayggtacgtttgtgttgaaatagatcaagaactgttttctgggggaaatctcaggccagctgtggaggtgagctagttctcttacaggccaactcctgacgatggtctcactcttctgagaggtcagtcctgccctccgtatggttgcttcttaggtactttcccttaaattgacagtgagggagctgtgtgtgagtttggtgatggtatggggttggagttacggaaaggtcttgagaaagaagaaaataatcacctagtgggtagtagttttcacagggtgatctacatagatcacccacatcagaatcctctggggtccttgttaaaaatgttaagttaggattttgccccagactcatcaaatgactttctaattgtaaagaataggcattttaaatattatttcctgtaatttcaggcatcctaacatgtgatttctcagataactrtattttgaaaaagttcccaccactggttaagaacaagtgcccaggcagggcacggtggctcatgcctgtaatcccaggactttgggaggccgaggtgtgtggatcacgagstcaggagtttgagaccagcctgaccaacatggtgaaaccccgtctttattaaaaatacaaaaattacccgggtgtggtggcgtgtgcctgtaatcccagctactcaggagaaggaggctaaggcaggagaattgcttgaacctgagaggtacaggttgagtgagcagagatggcgccactgcactccagcctgggcaacagagtgaractctatctcaaaaaaaaaaaaaaaaaaaaaaaamaaaaaaaaccaacaaaaaaacaactgaccaaatcaagtaactcccctccaggttattgtcagagaatataatcttgaacacagcccagttgtctttttctttttggaattaacatatttatttaaaataaaagtgaatayaaaatgaataattttcaaaacatgcttataaatataaaattaaaaaggaggccagacgctgtggctcttttccagcccacttgtctacgctggatatcctgagggcacttgattttgtgaccccaggactaagtcaactctgagggctgtcagcctggagcatacagtcttatccactgttagaatgtcttttactgaaataacatttggcataaaacttgtagacataaaacagtctgcagccattcgtggtggctcacacctgtaatccagcactttgggaggccaaggcaggcagatracttaagtcaggagtttaagaccagcctgggcaacatggcaaggcctgttctctacaaaaaaatacaaaaaattagctgggtgtggtggcccacacctgtagtcccagktactggggagactgaggtgggaagatcacttgagctcacttgagctcgggagtcagaggttgcagtgaactgtgattggtccacactgcactccagcctgggtracagctgtcaagtaccctgtctcatggtacttgcagttgatgctcactctttgtccactgaaatagttgcttcctttatctgctgtggcctcagatgctgaaagccttgacataatttccaaactataattttgtattggtaactggggaatcttttcaatgctagatcaaacaaactgatgtaagtttatgttttaggaaaacagaaaagtttcaagatatattgaaataatctggccttcttgccacttagtttctcctaagaagccttctgttagaatatttgtgaaatcatattgtggaattagtcacagaaatgtagtcaaagttgataaaattaaccctgtttaaacatgactttcaagtagttttatttaaaaacacaatattggtgatgttttggaggaaatacacattctcacatgtagttggtcagaatgaaaaatggcagaaacctttatggagggcaatttgacaagatttattaatgcctacaccaacaattccacttttaggaatttattctataggtatacttaagcctatgcatacaagtaggtacatcatgtataggtacagctggctttttactgcagtgtttttttttttttttgtgagacggagttttgctctgttgcccaggctagagtgcagcggcacagtctcggctcactgcaacctccatctcttgggttcaagcgattctcctgcctcagcctcccaagtagctgggatcacaggcacatgccaccacgcctggctgattttttgtatttttagtagagatggagtttcaccatgttggccaggctggtctcaaactcctgacctcaggtgatccaccggtcttggcctcccaaagtggctgggattacaggcatgagccactgcgcccagcctttttactgcagtttttataccaagaaattttaaaaatgtatatrtatctaaatatttgtacttattcagaactttctgatttacttaaatttctaagcctcaaagaagtaaatataatgtatttactactaatggaaaaaaggtgtagaaagtatgcataatatcctatcacttctgtatgtttttaaagcataagcccacatatacatgtgcttatatatgattagaatactttttttttttttggagacggagttttgctcttgttgcccaggctggagtgcaatggcgcaatctcagctcactgcaacctccgccttctgggttcaagagattctcctgcctcaacctcccgagtagctgggattacaggcatgcgtcaccatacctggctaattttttatttttagtacagatggggtttctccaagttggtcaggctggtctcgaactcctgacctcaggtgatccacccgcctctgcctcccaaagtgctgggattataggcgtgagccaccgcgcccggctactttttttaaaaattagtctacctttataaaggacatatagttgttggcygggcgcggtggctcatgcctctaatcctagcactttttgggaggctgaggcgggtggatcacctgaggtcaggagttcaagaccagtctgtccaacatggtgaaacctcgtctctactaaaaatacaaaaattagccaggcatggtggcaagtgcctataatctcagctactcaggaggctgaggcaggagaatcactcgaacccaggaggcagaggttgcggtgaaccgagattacgccattgcactccagcctgggcaacagagtgagactccctctcgaaaaaaaaaaaaaaaaaaaagacatacatttgctttttgggagcagaaaagggggcatgagaatgacttattttttagagtctccttttgaatttgaaacagtatgtatgtattgacctrtttttaaaaatcaattaactatacctatttaaaaaaattaactacaactattagtaagtatacaacttaggtttccaaatatttaatttttttttctattttcagcaaacttcaaggcttttgagattcttaaagatcatctgaagaaaattcatcagttttctgcttaactctrtatcttatgtgattctgatattacaataaaattatggtaaactttaggatgttctgcttaaatttgtattttgtgaaattttgatactaagtgataaatatgatggtatacttgagaaagttttctaggaaaaatattttctgcatagtcttttaagaaaaatatatgggggccaggcgcagtggctcacgcctgtaatcctagtgctttgggaggccaaggcgggtggatcacctgaggtcaggagttcgagaccagcctagccaaggtagcaaaaccctatctctgctaaaaaaaaaaatacaaaaattagctgggcatggtggcgggcgcctgtaatcccagcttctcgggaggctgaggcagggagaatcacttgaacctgggaggcggaggttgcggtgagccaagattgtgccattgtactccagcctgggtgacagagcgagactctgtcaaaaaaagagaaagaaataaaaatatgtggatatgtatatactttttttttttttttttttggagacagagtctagctctgtcacccaggctagagtgcagggagaatcgcttgaacctgggaggcagaagttgcagtgagccgagatcgcgccactgcactccagcctgggcgacagagagactccatctcaaaaaaaaagacaaaaaaccccccaaaatacaataattagtcgggtgtagtcccagctacttgggaggctgagatgaaagaatcgcttgagcctgggaggcagaggttgcagtgagctgagatcaggccactgcactccagcctgggcgacacagtgagactctttcaaaaaaaaaaaaaaaattacgaagagcctggactggaagacattgctttcaaagagaattagcttttgagagaaaaggtactaataaaaaaatataaaaatgacacagtgaaagggaaattcctcaaggaaatttaatatgaatgcagtgataagttaatttagcagcaaagagaacatgacaatctgatatgtggtttggggatggaaaattggaagaatgttagaaggggcctaatgttagaagagcaaggtttaactttaatttcaagaataacctggtaaaatcaaagtttaaagatgaaatcaagacataaatttaaacagtttgggcctagaaagtggcagtaaaatagacatgcaaggctgctggtgcagttatgagactcacagagctaaatatgaatgatgatgggcagaagtttataaatggaaattgaaatcaaggtgtcctctcattcagtggatacataattgcttctataattaaagcagaggtattttgagatcttttcaagaacacagtgaaagtagggtgcatttaggggttaaacaagatgaagtgaagtgaaacaaggcagtgtaaattgccagaagcaggccatcaatattagaataaggtaaggcaggaactagaaccaggtgaggatcaacatcgtccagagatggaaaagaaagccaaggtctgtaagataggacagcagaggagccggtgtgaaagagtggactttgctttagtaaagaacagagacagtgtgttcccagctgggtgttcccaactgggtgtttaatcagctgaagcccggctgatctcactgctgcaatctgtttacgaggcaccattaagtgaaggtgcacctcaaagcaggagccagattgttaacacacagagatagtggtaagatttctctactataaaaaaagcaaacacgtggtttctgtagggaaaccacagaatgccagagactggacagaccgaatgaagcattcttcagccaggggcagccatgcaggaaaccaggcctatggggccattttagagaaatctggatttttcggtacaatatcctgacttcgcaagcactaatttaaactgcagtttgcaaccaagaagacatgcttacagattggattgtgctcatgaactgttttccctgccttacaggcataggaatttgattttgtagtccataagagatccttattaagcaaaatcaggtgagccccagtcattcaccaccatctgtgaaatttagtgtcctcttgtaatggtggtggtagctcatagcagggaaggtaaacttaaaatgggacatttcattctgatcctatgcacatatatgcgttttctctggagccaaggctcctacccactctattcaagggctccacttttattgtttttattgtgcttacactttgggcttcatttttaggcaggttttctgaattaaagggctgggggggttgtggaaaaggttgcaagaccattgctccaattctttaatacatgtattaaatgtttactatgctaggcactgtggtaagtgcttattcattgcgcaatttaatcctcattaggttcactatcacctttagttatacatgaagaaaacaggcataggtaggttaaataagttgcccaaagtcacacagctggtaagggtcacagcagagttgatgctgggttatctgactggagtccaggcgcctcaccagcatggtattgtcctgccttcgtctacttccttactgaacatgctactgaagatatacaagatcatttatcttgagcagtgtttcagactgaaggtcaaactgatcagtgggttgaaatattaatgagtcatggcagaatagaaaattccagtgcattaagttttgtctcatgaagctgtttgttatgtattaggatctggcatgtgctatcacagtatctcacttaagtcagtaggtctcagccatctactctggacctctacttcccaataaatagaacaaatggcatctgaagagagcaaatgcagtatttgcgcaaggataggataagagagtttgcacaaaggggttaataactgataatggctcaatacctaggcacttctccctccaaaaggcattcttttttttttttttttttttttgaggcggagtttcactcttgtcgcccaggctggaatgcaatggtgcaatcatggctcactgcaacctcagcttcccgggttcaagagattctcctgcctcagcctcccaagtagctgggattacaggcgcctgccaccacgcctggctaatttttgcatttttagtagaggtgatgttttaccatgttggccaggctggtcttgaactcctgacctcaggtgatccactcacctcggccttccaaagtgctgggattataggtgtgggccactgcgcctggcccatttttttttaaggatagctttccttaatggatgaattttaggcaagagaacatttgttttgcgcaagggggctcttccacaactgtacactgtcttttcccaaagagattcttctgggaaagagaacatcatatagtaagaaacttggcaaagcagagggcaggaaccctcagagaatctaatgaaagctatgggccctatgggcctctactgagacccatgtccccaagccccacatgagcctgcccctacacataatttcagagggttcgggaaccctaaaggccattatcacttctaaacaaccagttgtagtttgttgtcctttgagaagtatggtgtgttcatgtattcatgtttggaaatgccttttttaaggtcaaacgtccagaattttgatgttacaaaggtgagtgaaaataagttgacaattaatccttggttatgctcactgacctcagggttataatagaaaagagtgcaattttacacatccctcaggtgctttaaaccttttggaactcatctcaaagctattttagatgcaaagctttaaaacctaacggtagggtattctaagactttttactaaacaagttcatagaaaattataaaatgtaagcaagcataacgaaaaagttataacaatctacaattccactatcagaaatattgttaatattttggtaaatgtggttccagatttttctctataaaaatattttgggatcatactatacatactaaacttgcttttttctttactatattcattcatctgcctgcccagtaatgttctagacatcagagaatccagtggtaaaccagaaaggcagggtcctagatttcatgatgcttaccttttcaaatggggagagccataccttataacaagaaaataccaaatgcaaaccatgtttaaaaaaaaaaagccaagcatggtggctcatggctgtcatcccagcactttgggaggccgaggcaggcagatcacttgaggtcaggagttcaagaccggcctggccaatatggagaaaaatccatcgctactaacacacacacacaaaaattagctggtcatggtgatgcatgcctttagtcccagctgcttggaggctggggcaagagaattgcttgagcccgggaggcagaggttgcagtgagccgccatcgcgctgctgcactccagcctgggtgacagagtgaaactccatctcaaaacaagaacaacaaaaaacgatgctggccattttatatgaggtgttggaggtgggagaagcatgttgcagggagtcactaaggtgacatcatttaaggtcttgaggttcgatggcctgtgcccaggctgcacaggagtcaagagtattctgacattagactgattggggaagaaaactagatggtgaatacgaagtgtgttagggattaaatgtagacacacataaggaacttggatatgaagttactaggttttcagcaggtaatgatgtaagttgatttgattttaaagatcactaaagcaactgtgtggaaaagagattgtcagaagggaagagctgaagagaccgattggaagctattgcacaagtctgcgatggagatgatggtggctcagagcagaaatagaagtggatatatttggagtgtacaagaagagacaacaggactatgtaactgaatggcagcagggtgagggaaagaggaatcagcttatgttttaggtttaagtagctgggtaggcggtattatttagtgcaactggggacagaacaagttagatataaaaatcaagatttctacgtagaattgttaatgtgagatgcccatcaaacatccaggtggataactgcggggcagtggcatgtgagtctcttggagctcagtggtcaggtagaactggagataccattttggagtcactagtctcaccccagatgagatccacgagggcaaagtttttttttttttttttttttttcttttttttaggctaggcaaggtggctcattcctgtaatcccagcactttgggaggccgaggagggtggatcacctgaggtcaggagtttgacagcagcctggccaacgtggcgaaaccccgtctctactaaaaatagaaaaattagccgggcgtggtggtgggcatctgtaatcccagctactcgggaggttgaggcaggagaactgcttgaacctgggaggcggaggttgcaatgagctgagattgtgccactgcactgcagcctagataacaaagggagactctgtctcaaaaaaaaaaaagtacattttttaactctaaaagtataagatacataaaatctactgtcagcgtacagcacaatgaatttcacaaattgcacacccaatgtaaccaagattaacagaccctcacccagaagctctcccaacatggccatcactagcttggcttaacagatttattttgccatgttttgtctattatatgacagagtcatatgtattattttacatctggtttctttcaagcaccattatgttaatgatactcatctatactgttgagtagtgcattgtgtgggtggatatttacatttatccattctactatgaatgagaatttgggttgcttccagaatttgtcaactatgaaatagtgccgctatgaatacacacattgtagtacatgtgttttggtggggatatgtgtttctgttgaatgtgtatctgggagaatttcattgtcgtaagccttatgttaacagtgttccaatatatactcccaggatatgaaagtgcaattgctggctgggcatggtggcttg

SEQ ID NO: 94622 - DNA, 46868 bp, Homo sapiens
  misc_feature (1)...(46868): n = A,T,C or G
ctccaaatggaggcaagcagggctcctggaaaccagaagcccttcaggggcctttgaggggaggagacacctgggctgggtctttaaggatgagtaggagtttttccaaaaaggcgttttgggcagaacacagatatgccaggtacagagattttaaaaagccagagaactggccaggtgcggtggctcacacctgtaatcccagcactttgggaggccgaggctggtggatcacaaggtcaagagatcaagaccggccaggcacggtggctcacacctgtaatccacactttgggaggccaaggcaggcagatcacgaggtcaggagatcgagaccatcctggctaacccgttgaaaccccgtctctactaaaaatacaaaaaattagccgggtgtggtggcgggcgcctgtagtcccagctacttgggaggctgaggcaggagaatggtgtgaacccgggaggcggagcttgcagtgagccgagattgtaccactgcactccagcctgggcaacagagtgactccgtctcaagaaaaaaaaaaaaaaaaaagagatcaagaccatcctggccaacttggtgaaaccctgtctctactaaaaatacaaaaaatttgctgggcattgtggtgcacacgtgtcttcccacctactcgggaggctgagtcagaagaatcgcttgaacccgggaggcggaggttgcagtgagccaagatcacaccattgcaccccagcgtggtgacagagtgagactccgtctcaaaaaaaaaaaaaaaaaaaaaggcagagaaattgcaagcatttcagagggctgccagtggatgggacaagctcagctgaatggagtgtatgtgggggagggtagaaaggggacagatctgacttcacctggccagtgttggggaaggaagtcgccaacagaagaacaatgaggttcacaaatttggaaaggagagctttatttctcataaagggttgcagcctgcagggcagccattctgacaggctgggaagcatagcttccagccagaagccaggaacacatgcttcaagggaggggcaaagggaacaggaatttatacagagcagggtggctgaatatacatatttaataagctatagggggagtcatgaatattgatgtaaggagaaacagggacctgtgcaattaagcttcatgccccttagtgagtcacacatgcaaaaaaatggtggcgttagtgtgatcgcagggtgtttttcagccctctgatgtcaaaaggtgaagcacaggaccctactgtgtgccaggcctctgtgaatgcgggaggggaaaagagtgacaggggctatgtgggaggaaggaattgggggctgtgtccccttctggccagctctcaggcaggctcctggcaccacagggcctgagctgggagggtagagggtggagggtggggcctggtgtgcctggctgtgcccggctgtgcccagggctggctgtgtgcgactgagcaagtcacttatctctgacgaacaccttcactgggcgtccactttagactgtctggacaatggtttcttatcaggaagggatgatggtcagttattgtgtcaaaactgcaaaagagggatagcatcggacagctggttggtatcagtggtgaagtctttcaaaagggctggtttctggctagccctaaccgtcagcaggctttcttccctaaggaaggggttcaggaggggctgtatcgaggagtgtctgacctcccattctgttgtagccaagcactcagctttcaaggtttctctggggttcccttggccaagacggggggctgttggggggcttgggatttcattttaatttctcaaaggaccctttatcaaacaccttcggtgctgcccagcaccaccttgtcacacatcccacctccctcaccctccccacacgctgtcaggtggccacctttatgcccactctgcagaccaatgggcctaggctttgagtgtggagccctggcgcagctcggagggccccgaccggagccagctcactctgcccactgcaccgccatgctccctgaccacctggagccttggcagggctggggcttgatggcttggttctctctttctttctttctttctttttctttttcttttttgatagggtctcactctgttgctcaggctggagtgtagcggtgcggtcctagctcgctgcaacctccacctcccgagttcaagggattcttgtgcctcagccttcccagtagctgggactacaggcatgtgctaccacggccggctaatttttgtatttttagtagagatggggtttcaccatgttggccaagctggtctcaaactcctggcctcaagtaatccgcctaccttggcctctcaaagtgctgggattacaggcgtgagccattgcgcctggcctgtggcttggttttcatggcatgggtgaggagcctccccacctggagacccagggccaggagtgagatgccccagggaggtggaatgcggctcccacaggccaggcagcagctgctgaaagggtaacagacctagcaattgttcccagagccaaaaaggcctgggtgaaaggggacagcagggctgtaaggagacaccgcctgagattggctaatcttgtatctgggcttttcccacctccagctcccacagcctccttgtcaggcagctcagcccctagaggagcagtggggcaagagggccaccaaccaccctcccccatatcaccatggagcttggagccccagcctcccccacgtcatcgtggggcctggaggacggctgggagaggatggagagaaccagattccattgatgtcaatgcaatgtcagggcagtgattcgtcccattctgcagatgaagatactgaggcttagggattgaaatgactggaacacttggcgagctggcatagaacccaggtcttaagctccctgggattcagcttctccacctgctgagcacctccgtgcctactgtgtgccaggcctctgtgaatgtgggaggggaaaagagtgacaggggccatgtgggaggaaggaattgggggatgtttacccttctggccagctctctgggagggaggcttctggcaccacagggcctgagctgggagggtggagggtggggcctggtgtgcccagctgtggctgtgtgaccgagcaagttacttatctctgacaggctgggcgtggggaagatgtacttgccacacagcgcccaacacactgagtgccgcattgaggacatggaggcggactttggtatgaacccaacaaggctgactccacttcggcctcccaagaagcttgggaatctggaaaggtcaggagaacaaagacccaagctgggggaagatggagagcaagcaagtcccctgaccctggccagctctgggcagggcagcttccctggggagtggggcgtgtctttacttctcactgggcctcaagggcaggggctggggcttgggcaggtcctcctcccctttgccaggagcaatggaaatggaggaatgtgattattttgtgcctgccttcgtgcttgggggccaatgtcaaggttttcttgatgctcagaacgagttcaatggagaatccagacttgaaacagcacttctttcatgggctgagggacgcccagagttgctgctgaaggctcagggagggagagaaggttctggggaaggaaagtgtctgtgaggcggtcccttccagaggggaatgagtcccaggcagggagagctgtggcatggggaattgggggagggggacacatttgagcagaaattgaaggttctttgggggccggagaagaaggggcagagagggttgaacagccaggctggggagaggaggagggcaacatttttgcagggcagaatagactggattttgggggagtgacaattaccttaagcacatgtcatggagatgatttattttttttttgagatggagtcttgctctgttgcccaggctggagtgtagtggcatgatctcggctcactgcaacctccgcctcctgggttcaagcaattctcctgcctcagcctcccgagtagctgggattacaggcgtgtgccaccacacccggctaatttttgtatttttagtagagatggggtttcatcatgttgtcaggctggtcttgaactcctgaccttctgatccacctgcctcaacctcccaaagtgctgggattacaggcatgagccaccatgcccggcccatggagatgttataatggaatgtgcttagagtgataggaactaggaatggatcttacactttcaaatggttgggaaaacatcaaaaaatgtttctggacacgtgaaaatgacacgaaattcaaatttttgtgtccataaagttttattggaacaccgccaggctcattcttttacgtattgtctatggttgattttatgctacgatggcagagttgagtagttgggacagagaccatatggctggcaaagcctaaaagatttacaatcaatctcttaaagcaaatggtttgcccacccttgcttagagagagcctccaggaagaaaagagcagtgagggtgacgttgaagaagggggcaagactaggtcaccaggggctccctgtgcccagcccaggcactgaacttaagctgagggcaagtgggagccattgaaggtgcaggcaggagagtgacctgctcaagtgaatgttggagtaggatcactctgcctcctcagcaaggatggatgaagctgggcacggaggcacctggagcaggtagaccagccctaggcagcccggatggttcagcaaaggcctctgggactattctggagcacattcgctgggatatagaataggtagcgcatccctgcaccttcgacgatggcggcgcagagatgtctgctgcgtacccacaatgccttgtgcctcgcaccgcgggaggaagtggctgctctgtaggccccagaacggaaccacttgaaaggcgggaaacacgtgggggacscctctgagccctgagaggaatggcctagagcaaggccacgaggagccagggcacgacacggtgggccctcggagaaccgctggtgggcaagtggcaggagagtaggctcaagagggttggcagggccgaccgggcctagggtggccgggtgaggggggcgggggaggggaggcccccccagttaccccaggagtgcgcaggtggcttcgggcatgtgagggacggagggggtcggacggaaggacacaggccggtgtacagcggtcacccacgccccaagcagacacacagactctgtagacaccgtaacaggcccggcaccgtgcacacatcacaggcccaggcctctgcacatggtcacagatgcctatgcgaaatcccggcccaggttcacgcgggcacaggcgcatccacgcacacaccgcaacacggatctgcacgtccatgcacacacaggcacagactcgggcacacggagtcacaccgacccgggcacgctgcggaacgcacccgtccacgcatacacagaacgggacttgctgccccgcacgcacaccaggcccgcactccgaactacccgcattccccgcacacgcccccgcgcaggccgccccgggccgtgggccggcgcacgcacggtcacaggaggggcgcgcgcacactcgcactcacacacactcgctcgcacacgcacacactcgatccagcacgcgcgggcggcgcggggcggcggcggccggagtctgcggtgcgaggcgcccccggcccggcgcggcggcggagcccggctggcgggggaggggagggggttgcggagggggcggggtgggggccggagccgcttgagccggcgggagcgggcacccctgcgcgccgcgctcggcctcgcctccgcgccccccgcgcgcccgccgcggtccctcccccgcgcccgtccgctcgccgggcccccgccgccgccccggggtgcagccgagcggccgcgccgggtccccgggacggggtggaagtgggggtggggggaggggatcggggccgggccggggccgcgctgcctgcgatgccgggcgcccgccgcagccgctgccgccggagcccgggatggggcgagaggctgcggcggacgccagcatctccccgccggggaccccgggggccgcggagccgccgccgccgctgctgccgccgttgctgagacccagcgggcgatgggtgagttgaccccggcgtcctggggggcgccgcggcccctctatccccgcgctgcccgccctcccgcgctgcgcttggcgccccccgcccggctccgcggcccactccccgagcgtgaccttagggggcgggcgcgggcgcactggggctgggggcccggaggccgcggtgggggcgggatgccggggaagccgctcggcgcgggccccctccccctacccgccgctcctccgagctccccggtccccggagggcagagcctcagcgcccgaccccctcccacggccgggcgggggacgtccccgaggcgcggggctcgagccgtgctttgtgcgcggcaccccccagcctccggcgcggctcccccacaacctccggcgcggcgcggggctggggtgggaggcctccgcgcccgccttccccacccccgaccccagactgcggcggcggcagccgaggcccaagcgcagtcgggggctgggcgggtgcgggggctgcggccgtagctacccctggggaccaggcagaggcaaatgtggagagggcccccggccatttaccggggtgggggcccccggctccttgcattgctctgcccagggcgggggagggaacctggctgagggagggcgctataaatatctgcaaatagtgagttctggaaccgggagtggggaggggagtgcgcctgggtgtgtgtatggtggggttcctgagctggggtgcagcaggaagggatgccgcgcggccagacctagtggtctgaggtcggatgacccccagccccggaagatgcccctgaaggcccctgatggggtgtgggcagacacactaccccagtgggattcctccctggttscccacttcattcctgggacacaccagtccagattcgccttgatgggggagttgtgagcactggcgtgtcgtttggggagggggagcagttatgaaagatccagacatggagcccagcagaaggatggaggggagagcccccacccccaggagctgcagctctgagggggttttcagtctaaggagtgctaaggggagccgctctgggtcctaggaaggtttgaaagaggggtcccagcccaggaggaagagagaggttactggaagagatgacgacaggaagctgccagagatctctgggtagagaaaggtgggaagggcgttgtgggccaagggaatggcatgagcaaaggctcagaggtgtgagtgtctggcgtgtgttgagaggtggcagtgggaacagtcaggcactgtgggtgccccctggaagaagtgagatgaaaacggggcagaggctgggcagggaggccaggtggaggtgaggtgggagggcacagcagggagctggcacttggtcctgaggacggcagggagccaagacctggctggggggatgccgctggctcagacccattctaagggtctgcctggtgcccttggtgtggtcagggctacttgaggcacactggtgattcctttttcttttcttttcttttcttytcttttttttgagatggagcctcactctgtcgcccaggctggagtgcagtggtgccatcctggctcactgcaacctctacctcctgggttcaagcaattgtcccacctcggcctcccgagtagctgggaccacaggtgcccgacaccacacccggctaatttttgtatttttagtagagatggggtttcaccaggttggccaggctggtctcgaactcctgacctcaagtgatccacccaccttggcctcctaaagtgctgggattacaggcgtgagccacctcgcccaaccctgatgatttctttttctgtagtaactggaccacctcaggaagtcagctttctgagcctcggtttccacatctgtgaaatggggaggttttgtttttgtttttgttttgagacagggtctcactctgtgatccaagctggagtgcagtggtgtgatcatagstcacagcagccccaacctcctgggctcaagggatmcttctgccccaacctcctgggtagctaggactacaggcgtgagccaacacaccctgctaattttttaaaaagtttttaatagagatgaggttttgctatgttggccaggctggtcttgaactcctgggctcaagtgatcctcctgcctctatstcccaaagtgctcggattccaggtgtgatcaaatgggggagaattttgaatggaatgagttgcagagagggttgaatgagaggatgcacacagggtgcctggcacctgagcagcactcaagagatcgctggctgcggtattattacctggaaaaygaggatgccgatgccagctggcgggccaggccagcttcactgggcagcggccatgagaatcacgagagggctgggctggacgtgaacggcagagagctgagggtgggggaactgcgtggtcctcatgcaattctgggaagactacatamgcagtgaggagtggccagaggcagggtggtctgcaaagacagcccctcttggcctcatgggcacccacccgcccagccaagtcattcagggtatcctgctgtgctccccaagagccagagcccctttgctccccagagtgcagtgatgcagcccctcatcttagccatctccaagcccttcatgtggggaccaggtcttggaacacagtgtcctcaggtaggggtaataatttactgtgctggacagagaggacataggccttgccctgaggagattagaatccattggggagcagatacccctggcaccgatgctccacctasccctgtgctggctgcttgggggcaaggaaagagtcactaaaagtagggattccagatctagtggcccggttcaaatcccggccctgcctctctcactgtgtgactgtgggctggtgactctgcatctctgtgcctcagttttcttgtgtctaaaatggcgctgaggcgaggcgtggtggcccatgcctgtaatcccaacagtttgggaggccgaggtgggtggatcacctgaggtcaggagttcaagaccagcctggccaacatggtgaaaccccatctgtactaaaaatacaaaaattagctgggcatggtggcaggcacctataattccagctacttgggaggctgaggcgagagaatcgcttgaacctggaggcagaggctacagtgagttgagattgcgccactgcactccagcctgggcaacagagtgagactccatctcaaaaataaatagataaataaataaaatgggggtggggtgcactgttactatttgaacagcttggcatagtttccagtggccatttactgctcccttccagaacgagtctcccgattcacccctgcctccttggagactacaccacctgcccttcgagatgtgttgtttacgtgtccctgatgtcttccttttctgactgagtccccctgcccagggacctgcctttccagatccattgctccaaccgggggcaatagtaggctggcaactggctctctgggaaacaaacccctgatgagttggccgatcgctgtgctgtaaatcctccccatatggctgattttaagccacccatggcctaacaagagtgtcataatgggagctggtacgtgccagctttagtccccaggcattcagcgggtgcttaatagatgatggttgaatgaggaggaaaggatgcagagagtgttggtcagctagatttgggagctgcgggcgatactgtaggtgagaagggctttcagggggaggcatgggagggctggaggtgaggggccaccctgcaccagccctggggtgaggcttgagggaacggagagcttctggtgtcctccccgtcctgagaccctttgcacccctgaccctgacgcacacttgcactaacccctccttcgaggggctcctctccaccttggcctggccttggggttctgcacagaatgggccccaagcttaagccaatgagagctcagagatgtggcccaagcaggtcccaaacctcatgttccattcccttgctgtgctgttccctcgacttgaattcctcttccattcactgtcccctgtaactctgttgtccatcaaaagcttcctcatgacccccttcctctgtgacaccagccccacaacccaagtcagacagacccatctccccttctgctcttcccccgatgctacagcccctcccatgtacacgttcctgcctataaaaatatcaatagccagcatgtgttgtgttcctatggcagccagtgacagaggttccaggatagtcccctctacagatggggaaattgaggtgcagtctcttgttcacactgacccactcttttttttttttcttttgagaagagtctcactctgtcaccaggctggagtgcagtggcatgatctcggctcactgcaacctctgactccstggttcaagtgattctcctccctcagcctcccgagcagctgggagtataggcacgtgccaccatgcccagctaatttttgtatttttagtagagatggggtttcaccatgtgggccagatgttctcaagctcctgaccttgtgatccgcctgcctcggcctcccaaagtgctgggattacaggcctgagccaccacrcccagcctgcactgacccactctttacatcttagctgcagcatctctggctcagggaagcccacatgcttcctggtgttcttgctgtcagctcccagagtatcacgccggtgtctttggcgtgtttgttaygtgttcctgatatactttcagcgacacaggtactgaggaggccctcagttaaatgtgcagatggatggatgaatggatgaatgaatgaaagaatgaatgaatgagtgaatgaataattctcagcccaggtgagcagccttgctgtcctgcttattactccttctccatccctgatggaagggactgaccctccagagggcagcctcacactacagagggagggtacagggacctgcttgggaggggctattgtccccaccgccaggaaggggacagtgagscttcgggaaggggcggagctgcccatgggctggaagcaggccaggaaccccctctcacagcagggagctgacaaggggacccacggccttgcccataagtcaggaagttaaccgacttgtcacgtacttctccttgggctgcctgaagtggaattcccccttttggctcacttattttcatcttttctataaaaataaaattgaaacaatggaaatcattcacacacctaattaccgtattgtttatgaacttatttggctcaaaactttggttcttaccgaagtgggaatcccttgagaggggtgggtgagggccaggccagggagacagacctgtgcacgtgccaggacctcagagcctgctctccggctgccctctctgggcaggccaggaacttcccagaaggaacagcccagagacagggttctaagtgagggaggccggcccgagtgggttctgggactctggctggcaggcctggtggtggatggctcccatggttgtcctccccaccttggcctccgggtcatcataatttgctgctctttatcaagcacttmctatgtgctgggcccagggccaaccaaccactttctatgcattctcccagagatgtctctaacttgctgagaggcaagcactattatcatccctgtttggcactttgagggtacccagagttgggggtccacagctgggaagtggcagggctgggattgtgtccagcctataggaccctcagagagcagcctccctcggtcacccagacctgttccttctctcccgtgggctcccagcagggcctgttccctgaggcttggagccctgagacagccatcacttagcctcttggcctccaggcttccccttcaaggccctccttctgccactgtcctgggccctgtctctggaacgcctgctcaatgtcacctgggcggcctgcgtaaagtacctgtttgccagaccctagccagccctgctgagtgagcatctcacaacgggagggctggaagcccacagtttaaaaaatactgacttggactcccaaagtaatcctagtactttgggaggctgaggcaggaggattcattgagtccaggagtccgagaccagcctgggcaacatagtgggaccctgtctctacaaaaaattaaaaaaaaaattaggcaggtatggtggcaaacgcctatagcctcatctacttggaaggttgagggggaagatcacttgagcccaggaggtcaaggctgcagtgagctgagatcgcaccaccactctccagcctgagcgacagagcaagaccatatctcaaaaattaaaaaaaaataaaaaatgctgccctgaggatacagaggcctgtgcattccaagagccagttcacagctccctggcatctgtagtggctactagatttcccaatccccaacccttgtaacccagatcctgtgaccgagcccccgcctgtgttcgtagcctgggccccaccagctcttcatacaccgcgctcacccctgccccacygcccccgccakgctgtcatcctagcacttgctgcctctgcctcttcctggaagcaagtcccaggcagggcatgatgcccagagcttgcctaatgcactgggcaaatctctcgtggtgagtcctcatcttgctacctggggcctggcacatggttgtggcaaattgtggtgggtgagtgatggtggctgccacaggagaggggcacagggagagctgcaggtgactggggatgggttgggcccccgggctggcaccgggcatgcactagggcctggctctgtgcctggcacgtagaaggcatttgatgcatatttcttgtcttttttttttttgagacggagtttcactgtgtcacccaggctggagtgcagtggcgcgatctcagctcactgcaacctctgcctcctgggttcaaacgattctcctgcctcagccttcccaggtagctgggattataggcgcccaccaccacacccagctaatttttgtatttttagtagagacggggtttcatcatgttggccaggctggtctccaactcctgacctcaagtgatccacctgcctccgcctcccaaagtgctgagattacaggtgtgagcctctgagcctggcctgatacatatttatttttttttctttttgagacagagtcttgctctgttgcccaggctggagtgcagtggcatgatctcggctcactgtaagctctgcctcccaggttcacgccattctcctrcctcagcctcccaagtagctgggactacaggcgcctgccaccacacctggctaattttttttttcgtatttttagtagagacggggtttcaccatgttagccagcatggtctcgatctcctgacctcgtgatctgcctgcctcggcctcccaaagtgctgggattacagccatgagccaccacgcccggcctctgtcaggctttatctttctccactccaggaccagagctcagtcctgagcccggagcactttgctctccccagctcctgctcatctacgctggcctctgacctggttcctgctgagaaatgctctgaactgggggcaggggaagagggaggggtgcagtcccacacgggcctggtgtctcctccttcacaccacacaggggatcctcagctctctgaggcactctgggtaagtttcccagggccccagacgttaaggttccctctgcaaaaatgggtgggttcagctggccacgtggcctctctgggctgataccctgggctcagctacaccccttggaaggttttcccttgggatatgggcacaagtgaaaaacagagccataccctccaactcactgtgggcattcagtgaaaccatgtgtgtaagacgctttgttaattgtagaacgctgcacaaactcatcaggtccctcacccgtcaggcaggctctactgcagacactagacacgatcgaaccacttcccctgcttagcactcaatttccatatagtgaaatgaggtttattttggcaccgtggcccatggttcctgagatatgaaaatgaaatcatgcaaaaaaactccagcactttgggaggccgaggggggtggatcaccagaggtcaggtgttcaagaccagcctggttaacatggtgaagccccgtctctactaaaaatacaaaaattagccgggcatggtggcgggtgcctgtaatctcagctactcgggaggctgaggcaggagagtcacttgaacctgggcggcagaagttgcagtgagctgagattgtgccactgcactccaacctgggtgacagagtgagactccgtcttaaaaaaaaaaaaaaaaagaaaagaaaaaagcctgatagagcaaaatgcgcactgcccgaaggtgacagaaacccatgttgatgttggttccagcaaaaggtgcatggggaagagaaaggcctgcgaggaaggcccagtcagaagccagccaggcccaggggtggcaggatggtggggacactgccctgcttctttctctgtgctttcctgatgttctagaatggatgagaaacctttaaaccagaaaaatgcagttgtattctaacagcgggaagaaaaggagccccggagacagccggctcctgcttggtctgattctggggccaccgcttgcgggcagtgaccggctgtggggtctcaccgtggggcttgcctagcaccaggcacttctaccagagcaagtgrayctgcggcaggaggcctgtgttgctctaattcctggaaattgggtcatgggagcccaggcctggagctcctggaatgcagtgctctgagaattttgtccaaacacctctgacctccttcctccggggctggtccagcctctttcttyccccgcgtcccccatgctccagcctcttgggcaattgtcatactccgtatgtgagcctcaccttcctacttcccggcctttgctgatactggtcccctgccctcctgaagagcctgccccttccagcccagctgctgccagagccccctctccttaggaagcccctcctgcccctcccagacagaggtgcccgcagggcaggagccagggctgcttgtttcacctccatgctgaagcccagcgggcgtggtcatccctgttggctgatgttgttactgaccccggcctctaagtgcttttcccactatcctcctacacacgggtcaagttctgcctagtggtagcgttatttgtcattgcatctgagccttgatcctgggtggggtcagtttctgtttctctcccagcttctgactctgtacccagtacactttgtgcccggtacagagcactcatctgtccatccgttctttcagcaattactccctaagtgcctattgtgcgccggtgactgagctaggtggcaggggcacagctctgctgacatcagggtgggcggcttgcagtttgcttgcatgtgttttgtgcatgctacatgtgtatgcacacagcatgaacatctccatcacatataaactagcgtctcttaggctgcgcagtcctctaggcaccttgtgcattcctggttaattcagcgagtgttgacagagtgcccaccaagcaggtgccaggccctgacatgaagtctttgcccttgtgaagcacctgtcttgtggagccattgcagtgagagctggtgcagagggtgaagggcagggggttggggcagcatcctggagagatgggaaaggggtggggaagggaatttctgcctggctggggtgtgctttgggatcccctctgcggccctgggggcatcccaggcctaggaaagctggactgggccttctcgctttgggagtgcaggcagccccatctctttggttccgctgctctcaagagccccaaagagtgatgaggctaagaaggtaggagtgggcaggagccctgctgctgggcaccgcgaagagaatacgaagtacagtgtcccaaagaggagacacatggacacgacacgggacctgtgatggagagctagcttgcttgcttccttcttttttcttttcttttcttttcgtttcgtttcgttttgtttcatttcgtttcttttctttcagacagagtctggatctgtttcgttttgtttcgtttcgtttcgtttctttcagatggagtctggatctgtcgcccaggctagagtgcaatggcaatctcggctcagtctcaaaaaaaaaaaaaaaaaaaagaggtagaaccttcagatgcagacagagaacctagaatctgaaacttagaggaggaaacctggagcagcaaagctagaatgtgggtcttccagaacatggagctcggaggccgccaccctcaccttgatgagcagcagtgggcacattggcagctctgctgagctgggctgggatgaggaccccctcatagcctcctaggttcctgaccctgggcacatcccctctccaagcagaggtggacagagagtaattgggagaggaaaagagacagggtgccttgttccagctgagggcgggctccctgggtgcccagagccccagccagctgtgtgcttgctctgtcaggaccacccccagcaggaagctaactgatgctcaggttcccagatcccaggggcaacgctgccaccctcctgcccaggagctgcaggctgcaggcaggtgtggccttgtcacctccccaggtccccacggtggcagagccacattcaagcccattccctcactcagcagcgcacctgcagcaccagggcatgaggcagtgaacacacagccgtgagctgtggttcagacgctggcagggaggatcctaactactgagccgctcttcctttcccaccgtcttcccatagctcctcctggccatgaaggctccagtcatttcctgtatctcccctctgccaccgctatcccattggaaggggcccttaggattcacgtagctaagctgcctcattggggtgtgacaagcccaagttggcaaagcaggcaggactaggaccatgggccacttgtgtgagccccagacaggcctgagagccctgcagcattgactggaaggtgcgggtgtgtggatttggcgtggtcatttattcattcaacaaactcagggtgagcaccttttttgtgtggggctcagtgcttgaggctggggacccaggggcatcagacagcacagcccttgtgtgggacaaggggttctggggagtaggctggggtcagggaggcctggagaagtgcagctcagccgaatcctccaggaacaggcacggagattgaagggtgagattacacagaaacttctgtgcctccttgagggacttggactttctcctgagggcagcggttccaagctgggaggggcagcatcagatgtggctttcgcttggctcatgggggccgggttgggggcccattgaggaagctgctgccattccggtgagcggtaggcttggggttgggagatttgggaagtgcgggcagtgggactgactgccttggtggtgtggggaggggcccagaagggggcaggtgggtggggaggggcccagatttgggaagtgcgggcagtgggacggacaagccttggtgatgggtggggaggggcccagaagggggagtgttgggaacgtcatcggagcgtcagtcccttggtgccaggcttgagtcacaggttactagctcaggttgttgggacagcgatttgagtttcacctcgtttgccacagagggtctcaggccagaaagccaggcctggtgtgacccaaagcccatgcccactgccctccttgctgcccagcccagatcattcctgccaggtctgcacctcgctgtccctcactccgtctggcactgggccrcctgagcatgcaagtgtgcccaccacctgctgccctgtacacatgggtaggtgccgggggaacagcatccgctccccactgcctaggactcttggaccagacctccacctgccacctggtgcatgagagcctctgccagccaacaacccctccactgccacccggggcacaatgcctgggacaaagtccccaatgctagagaagaccccaaaggatggggaagggcggggagcaccctcccttccatttccccgtacccccgctccgctcagcccgccaggctggagatagagctgaggctgtgtactgaagtggccctttgtacgttgtcaccagaggatggcgagcctgggcgggaggggctggcactgccggggctgcagggcagggcggcgctgaactcagcagagcaggggctttctctggggccacagggcaggggaggagcgcctgtcaggtgtgggaacttgcaggctgggcctgcacccccaaaccggaggatatttgtccctccaagtctgttgctgcttctcatctgggctcctgtgtctttggactgttccatgtcatccagcagctgtccctgcagtgcatgctccagggcygactttgtcctggggggtggggaacagtggcgaccgaggcctgtggtgaccctgctctcctgtggcctcgccagcagggtgagggcggggcagacgtaaacaacaaagtgggatcgcctctgcagggatgagcgctggggggacagcctggagagagggcttgcgggcgggggcagcacttcagccagctgctcaggggcccctgtctgacgagtrgcatcagagcatgcagggacctgaggaagggcgttccaggcggagggatcagccagtgcgaggaccctggaatggggccatgcctgaagagtgtaggagacaggaaggtggggagtgtggctggagcctgggggacaagggaggcaaggtcagcagaaacgcaggcatcagatggccagggtccatggcacgcagaggagttggggttttaattcttagtgtgacagggccatgggagggcttgagcagggagatgtggcctgatggggaatttgcggtgactctggctgctgcagaggcaggagggaagctagtgaggacctcggggtggcagaggaggcagagagaggtccatcctgggagcatttgggggaacggggcctgcaggctttcctgcccctctgccgggcatgtggtgaggcygcacccagctcagaggactggcctgtgtcaagactctggatgttatccgttttaatcccctcggggttgggatggcctcacattgctgatagaggcaccgaggcccagggtattcagtgacctgcccaagatcacggaggagggtttggaaagggcaggatttgaatccagccccttttgagtctagactccagagagctatggccccaaagcagcccycgccccacgctgactcctgagagattgggggtgggcacccaggacagcccagggtccaggagagccctctcacagaggcagaagcactcagcccagccccctcctgcccggcttttcctgggcctcctttgttatctgacgatggccacccccactcagaccaaaggctctggctgcccctctgcctgggaggcaccacatctctgggagccctgggggtgggggcaggggcattctgaccttggaagccagggcagggcagagctggctccttcccttctcttgtccagatggtctggggcagtttgttcgggcctgtaaggctgagtgggctgggaggtgggtagggagctgaaagcccgaagtatgggggtctcgaggatttatcccattggcctcagtgggtcccgtaagcacggaagctcttaagcctttgcggaggggctggcaacaggggcctattgatgaattagaagaagctgtgttccttccttcctctaacctgaagctttgttaataattaatcatctgcccaattaataattacaggcttgagcagccccttcccactgccctcaccccactccaacctcctctccgttcctccttccttcgccctcccagcccccactcctacccccgcccttccggccatcagtccttgccggccttcctctgcagagatggcaaggccctgtgcccttgggagtccccctgtccccsacaccacacagggcatcggttctattcttcccatgagggcctttcggcagccctccagggcaggtgccacacaatctgacacacagagacacgaggcacaggggcagaggggcagagcgacacggtactcattcactcattctttcactggatgctattgcactgttctctgtggtcagccaccaccctgagcaagacaagcaaacaggaaattcctctccaggcttaggggatagcgtgggggaactcctgagcaggctgggctgagggcagccccccagggaaggcaagggctaggaagagggaggagtccctagagggcgaggtattggagggtggggctttttgtataaagctccccggcagcaggaatgctcaaagctctgggctcagcctccttccagggtagggtgtgatttctgtcttcaccctcaagaggggtgttctgcacactgaggaatgaatgccttgctaagggtggacccttgggcttggagccagcagtacaatagctgtctggccgtctcctgtgggcagaatccagcctctgcccccactcccagagagacccaactccctccaaaaggctatggactcctgagcccccttgcaggagaggcagtgtgggttcaggctccctgacccccgccctgtccctgcccggtactttgtcagagactcggggtcccgccgtgccgagagtgtatttctgagctcttccatgcatatagtgttccttggttccctatcctcgtcccactgagaatgtccagtagcccctctgggagtcggggtgcagttctcgggaaccctcccacacagagagggagcaaggcgaggctcacaagagatggacctgctttttactgagcgcttggccctgacaggctctccacctgtaaaaccacagtgtccctacctcctcaagcacctggcacctaggagtggctctgggagggtggggctgcccctcactgctgcctggttacctgtttcacaaaggaggagactgaggctggagaggtgaggtgacctagctggaaagaggtggagccaggaaaccagcccagatggagggcagggccagcatctggcgggacaaggttagttcctcctgcagtcatctaactgacacctgggctcagcctctagggaggaaactgctgccatagagccttgaaagccaggcagaggggactagacactgtgcctcaaggcaggtatgggccggtgagggaaggaggcggcaatggctgggaggggcccaggcaggggtcgggcagctgcaatgcgggctggagtcttggggagtgtgggccacagggaagggttggatgcatgtcactcacagggagggccagggcttgtcagtttgactcactgaacttcggttttctcctctgtgaaatagcagtgggaggcggatgtccacacgagattagagaacagctaagatactgagcacagccccgtcagagggcggctctcggggaggcctcagatgtgctgtcctctcattcccctccttagtcctgtgtgtgctgctaycacagaatacctgagactgggtggtctgtaaacagcagaactttctcacggatctggaggctgggaagtccagggtcgaggagctagcatatggcgagggccctcatgctgcgtcatcccatggcagaagggcagaagtatccacacatggagacgggcagggctgaccgcatgcagttatcaggaacacgataactaacccactttgagcccatgctgttatcaggaacaataactaacccactcctacaatagcagcataaattcctccatgagggtggagccctcacggcctaatcacctcttaaagtccacacctcaacaccactgcactggggattaaatttcctacatgtgaacgttgggggacacatttttcagactatagcaccccctacatgattacaggctggcaaggggaagctgtggacacaggggcttggggatccctgggcctgtggccaggccaggctagctggaggccaggatcaggcagacagcagcaaacaaactccccaaggaggtggtgcaggtggcatgggacccctcgcttgcttgtctccaagttccgggtgatcggggctaggggaaaataatgggggtggggggatggaagttaaggggaggaggggggatggatgaggagggcagcctggatggaggtgtgtgggcagggggcagatggatgtggagtgccagctccagggtagatcagggcaaggttctgcagtgtgggtcaggatccagggcctccggagcctcctggagtctgggcctcaccttggagktttcctgactttttggaccttgagcctcctttaagctgcaggagacccagacacggcgcactgtccagggtgacccgttcctgttggagttgggtagtggtgggaagggctgccctgggtacccttggccttgcagggaactctgggctctgggaaacataatttcagcctggccttgcagtgtgccaccggggtgctcacatggtttcaggctggtgaggggcttaggaggttggcaggatgggcagatgcagctttcctgggcagcgaatccgatcatctaccagagctggagagccctgtgacctgaaaatggcaggcccatggggtcctgatggcagtgggggtgagagggacccttgccttgggcaaggctgaaggcagcagcctggactttgcccctgaaactctgagaagccccaaggccgcaggtgggtgtggactctgctgctgtcacttgccagctgcgagtttgaggccctgtgtgcctgtgggggtggaatgaagcgaggccagtagtgctacagtcttcacatcacccccaaccctytcacagccccaagcaccttccctgcacactggcccagccctcacgggctcccactgcctcctggctctgcacacagcaggtctgtggtcatgtgtggccctgcagaggggacccttttcctctccctgagagataaagagccctgtgcctgaaatgccaccagcagtactcattcctctggctaatcccaaacattcactgaatatwtgctctgggtgcttcgggcaggagccactgctcacttctggcctggcctgttcccccaggccaagtttacatctctccattccaggctttgtgtgtaagaggcagtcagagccctcgggccctcctgaaatgtgcatatgcaccactagccccggctgggacatccgccctctgctccctgataaggtccctctctgcctggactggggactgaggatccgagatggaaaagccccagcccagcgcccctgccttcctggagtcagagaggcctgggttctgcttgtggtgcggccttcaccaatcaccccctcctcagggcctccatctccctgctggtgtggagtgagggatgaattcacagcagggcttgccaggctttttttttttttttttttaactgtagaagctttccttccaacaaaatcttgcgaggagctcagtgtctgaaattgaaaagctgggagcatcttcttgattgtgttttttgggggcgagtccctgggctttgttttctctcccccttcactccacctctctctcaggtcctggggcacctggaggggagttccagggacctggctgggaaagagctgtcctcagtgcccatgggaccagtccatgggatgtgtctgtacatctgtgtatcgggccctgaggcccacctttagcccacctcccctcccgaggtctccttctgccaatcacctgcctaatgcccctgcaccctggtgtcaggcagccccccagagctgcatccctccctcctgtagttaaccaatgctctatgagcctctctyagccaagaccttggcatcagctcaccactgccccgcccctggccctccccttcatcacgggccgtctytcaggcttggcgccctgggatgctcccttgctccagctctgtgactgtccccatgagggtcctccctcagtgcagccccatctctccagcggtgctggcacgatggacccggttgactccctgcctcctgccctctccgttcagtctaaactgcacagtctaacgtaggaaccactagagcatgcagctattaaaattcaaattaaattaagctgggtatggtggtgtgagacttgtcccaactactcacgaggctgagatgggaggattgcttgagtccaggaattcacatacagcctgggtaacataggtctcgtctctaaaaaacaaaaacaaaaacattatggaatgagcctctggggatgaggagctgatgtcctgaatggaccagtgaccagtgcaggaggggtggagtcctagcaggggtagatcccagctttgggaaccaactttcccaggcacttgccggccactccgtgggaaagtcctcaggcagcctgcrgggagctgggatcagctgatggggatgggtttggaggggagagagtggtgcacagggactggaggtgggggaggggtggggttgccatggaaagggctcttgggatgggtcttgggctgagcctttggcaaggcctccaccctggagctgagccagcagagagtggggctgactccatgaggcccagactctcgtgggtattctggtggcctgggcaccctgtctttcctgaaccctgcctgcctaatctaagaactgctccccttgtagctctgtctctcctctgttggcctagtttcttcatccatgggtgggcacagcagaagctgtctcacctgctccatggtgaacgggatttgcaaggatttgactctggccatccagggaagatggagtctttgaccaggcctggcccctgaagcagacttcttccttctgagcctgctggggaagcagaattcctcgatgctgggtgtcatggtctaccaggccctccctcgcccaggccacttgtgttgagcctggagcagaacccccagatctgtagtccgcctgtcagcttggggagtctccgtttccrtctgtttcattcccatcagctgtgtgtggctgagcaagtcacttaacctcttgaggcctccatgtcctcatctgcaaaatggagacacacatatctgcgtccccgatgaccaccagtagctgggatgatacgtcgactgcagagtgaccactttgtgtaggcgtccctgtggatggttgtcagtcaaaggagtgagtcagatgatgagaggggaggacagcagagcagcagttgtttcttcagtctcgccgggactccaggatcggccatgttctgcagccaccgcctctacctgtctccccatgtgggatcctgaaacctcaagctgcatttagtttcagagtccggggaggtgctcactgtcttctgactcctgagatgccgactccctctgccataccccagggaaggaaccagtagcagaagctccagggaaactgatgaaggtcaacagaaggaagaacttctagcagcccaaagggattggaatgggcggcccgtgggagtggacatgcagaggcactggcctggggtgaagccttggaccaaattcttacttgcaggccctctggacccaggagaggagtctgcaggcctcggctgggccggattccgcagattctggcctaggtcctgaatgcctggtgagttactgagaaaggccctacaggctgagggtgccagtcagggtgaagcagccccgcaattggcccacctccttttgtaccttaacaaaggtgtctttgttacctttcttaaaggtaataaagcyggtcaggagcaaggcctggcatattcagggggtcatctgtatttggtcgtccagcgggaaacccaaatggaaggaaagaaaaaaaaaaaaaaccatgcatttatagaacctctgccaatggccaggctccatgcagaatgctttgacaccgtggctcagccaggtctcccacaggactgcaaaacagagggtgacatctttcttttagatcggagaagactgaggaccagagaagctaagtaacttgccaaagggcacacagcaagtaagtcatggcactgggattcaaaccaaatcctccagacttccagtaacagtggagccggcgtgtcctgagcatctgttgtgtgcttaggcatggtccctagctttttgcggggattaactcactcaactctcacaacaaccctgtgagacagaaacggttatacctccgtatcgtggagggggaaactgaggcacggggaggcagagtgacttgccaaggccacaagcagtgttcggatctggccattgtggccactggcctaccttgtgccccaggagctgctgtacatggcagggattgctgcaaagatgtgcctcctgccttctttttggaggtggcagagcccttaggtcacatggggcaggaccaggccgggtggaaggtgagcacagggagacgggcttcagcgcgaagccctttcgtacagttgaactaactcctggagaggtagtgcgggtccaccccaaggtgtaccagggctgggggcagtggatgggctacttcctgcccagaagtagagactgaggttgtttctggcatcctccaaaatgcccctcatggacattmcagggatgccctgagtgcccactgggtgttgggcctgctttactgctggacatgtgacagctggccccttctcccagttggaggagtgcccagtggctgtcccccagctgaagacgccagacatcaggtgttgaggggcaggcggagaaggggccagagggtggtggacaggggaaccggctgttaagacatgagccgtctgaaccacggaggtgggtggcaggggccagggtgaggccagccaagggcaccctggggactgagctaggactctggccagcacgggcaagctcaggaccacggagagctccacaggagccgcccttcaccaagcgacagctgtcagtgtgagtctgcacctgggaggctgctacctgcctggccagctcccaccatcacagccagtggcctccagagagcacctcccttctccctggccagaagcccctggctgggctccacctgagtcctgactrtgaggtcatggctgggtcatggagtttgggctcatcagcttccctccctcacagcccgtcaggcttccaagcagagctagagaaaaatggcacaagaagtgggaagagggagggaaagaaggaaatctgtccagctcagaccctccaggccatggccactgcctgaggcctgcctgctgccatcctgggtcagcctcagcctccctcttccaggatcacctggctgccaggaagcacctggcccatgctctaccacctatcccaacagacccaggaccggccagaggcggtggcccacgcttgcaatcccaacactggggggccgaggtatcacttgagcccaggaggtcgagaccagcttggcaatgtagggagacctcctctctacaaaaaaatgtttaaaaaatcagccgagtggtggcacacacctgtagtcccagctacttaggaggctgaggtgggaggatcacttgaacccaggagtttgtggctgcagtgaaccttgaccaccccactgtactccagcctgcctgggtaacaaagaaagacaaaaccctgtctaaaaaaatttaaaaagtcacaggcccctggggctgggcacaacttacggggtgtctggcagcggggtgggggtggagcctcaagccccccttttcttggagtctcaggaggcgtggcttcccagcccctggcccctccccacagcaggtttaggttttgctccctgttgccctgagataggacagcacccacctaggcttaggccctgccagggactcacctccaagcctctgcttctggtgtstccccacccaaaggctcactctttctcttctctgccaggctggggaataataatagaagagctagcacttatcattgagtgcttactgtgtgctaggcatctcatcgatgggaaaacagaggtacagaaaagtgcttaacctgcacaaggccacacagataggagtggcagagctgggatttgaactggggagtccgagcacatggaagtgatggtgagggcattgtggaggcccagggcagtgcggggtgatctcattgagcacctgctgtgtacattccctgctctagggagcttatatgccagctgggaagacagacatctaggggaaaatgagcctagtgttgactggggctggggccgtgcatagktctctctgattcttacttgaaataagcagggcagagataatgatacccattttatacatggaggagttgaggctgagagaggtcaggtgacctgctctgttcatagtgactataggaacattgatgatgatgaggagctgggggaggttgggagagttcgggatgggctctggcttggggcagaggcaggtgctttggctccagggaggctatcttggcacagagcaggcatctgagaaatactaggtgaattttaacgaactgagtaagagccagagtatggcatttgtgctaacagagattagccttggtggtgggaaggagctggagaggggttttgtcctcagagagctgcctgcctgggtcacagagggcgcccagcccagggaaggccctaagccctcgctcagttaaccttattccccaggtaggtcctaaccacagtgaccctcctggcttcctgagctgctggaggacctcaagccacgtacatccagggaagtaggtgggagtgggacagtgggctggacgatgtcccccacagtgctttgaggccacagggggaccacagacaaagcatatcccaccccgcccatccctcaggtgaagcttctagacagcatgctgcagagaggacctgaggtttggatctagagacaaaggttagcccaggacctgctgctagccagtgtttgaccttggccatgtccttcacgcccagcctcactgttggtgtctgcaggaggagaagtagtggttagggctaggccctgcagagacagatgctggctgcaagccccaggtctgccagatagggccagcctcctccaccccagtcaagggctggtccattcttccagtgcctggggccacccagtgtgctgccttgctcacatccagctcttcagcaaatccagcagaatctgagcacactctacaccctacaacctggtggaagccaccctgactcacctgggcagttcagtgtggcctcctggcttcccctgccctgcccttgaagtgcccattcattctcagcagagcagccaaagtgagccattcacaccaaggtcaggccatggcctcccttctctgaatcctccagtgaaagccacacttcgaaccatgcctccaggccctgtgatctgggtttgttccctgccccccatgtcccctcacttgctccgtcccacccgccttgctgttcttcactggcgcacatacactcctgccagggcactggttgtgccttctgcctggaacattcttccctggcgccctctcctgcgtggagtctgctcacgtcgcctcctcggtgagcctgccctgcccactccattcatcactggacataatgacgcactcgctcctgcccgttacccgctttgtctttctccagagcacagcctctttgggcgcgcagttttctgagctgactagtgtgtttgtagtttacgcaggctccctaccctgttgggtgctgagcaggttccctgagggcagggattttggtccgtcctgtctccccatgttcccagtacccaccgaggtgcctggcacacggggctctggcaaaatcgttgctgagtkaatgagtgacgtgggttgggtgagcaccctgtggcatgttgtatggatcaaatgccccagggctgcaccatccactgggttgtcttcactggtcacaggtggactcctcaggggctctgtcactctacttgggttgaacttggcagctggaaggggctcaggacagctttaccactggatacaaccccgtgattgaccctataggatccagtatgatccttctattgtgcaatgctgtgcaagcgacatcatctccctggcctcggtttccttatacaagggtacctgcttcgtgttgggaggattcagtacagtcacgtgtgtaacaagcttaggacagtgtctggcatgtcagcctcagtgatagttttactgttacacctgatggtttgtcaatgctttgttatttttgcttttgagataagagtctcactcccctgcccaggctggagtgcagaattgcgatctctcagctcactgcagccttgacctgcagggctcaagcagtcttcccacctcagcttcccaagtagctagaactacaggcacatagtagttctgcatgcctggcactgctagaaagtaggcactgctaattttttttttttttttttttgtagagacggggtttagccatgttgcccaagctggtcttgaactcccggactcaagcaatctgcccaccttggcctcccaaagtgcagagattccagaggcatgagccactgtgcccagctttgatgaagctttgtaatggaagctgaaatgccaccaactggggcccagtttggttccatggctttagcccacagctgggccacctgcactacagagggatctggtggtctcagctgtcatgagggagagaggcactggcttgagaaccagaacttacgttcaagtcctgactcagccacctccttaatgatgtcctttggggaaagtcttgccatctttctgagtctcgttttctccatctgttaaaacagggcagtttaaataacctaccagagtgcctgtgagatttaaatgagaccctgagtgccagtgcttatttattccattttatttatatgctgtctcaataaaaaaatgaaaagacaaaaaggaattgagctgaaaaggattgaaactatgcgggcagctgcaagtgaaggagtccaagaaaatgctgtctgtgaggtgctgttgacatgctctggctgaccactgtgtgcttctgagcctcctagcagcctgagtgatgagggaaacatgcccagatccttgattctcagcagcaacccagactgaggccttattaaggggccctgtcctgaaggctccagtgactgagaggggagctcccaagcactggtgagtccgtgctcagaagggcacagctggctatgagtaactagatcctgaaagccagccaaggggcagctgggtcaatctgaccycagcaggtccacggaggccctttacgccaagcaggctgtttccttgcctctctgagttcctcttaccttgctttgctaaagcctttgttcatgctgccaggggatttagagtctgaatggcagccccaggccatgcctgccacatagcttacaccagttgtgtaacttagagtgtccccctcagaggcaggtcccaagtacagaaaaatagcccactaaggctaggcacagtggcccacacctgtaatcccagcactctgggaggccaaggcgggcagatcacctgaggtcaggagttcgagacgagcctgaccaacatggtgaaaccccacctctactaaagatacaaaattagccggtgtagtggtgcatgtctgtagtcccagctactcaggaggctaaggcgggagaattgcttgaggcagaggttgtggtgagctgagatygcaccattgcactccagcctgggcaacaagagcaaaactccgtctcaaaaaaattaaaaaattaaaaaaaaaaagaaaagaaaaatagcccaccagaaggatccaggctgcctttccaagtcctgaaaccccaagagtaggttgctctggaagcttccgccatgctaaccccggctgcagtattgccttgtgtctggtcctggccacagcactcctagccccttttgctcacccwgctggtccagcccaactggtctcactttgccagacaagggctggaatccaaaatggagaatgaagtgcagaagacccacttcaaaatgttatcaaggagcagcccctccttccaaactccagtggcgaacagccccagctctgccctgggacatttagcagaggtcaggcccctaccccagattgttctacctgcccgcagtcagctgtgcccactccgtgtggacagctccaggggggcaggcgtttactggaggagggatatctgagctcgaatggggcaaacgctgccctgattgtcgggatcagcagctccactgcttcttaccagcctgctcaggactcctcgcaagctgaggtcatgaggggcacctggtgcaggagcccagctgcccggttcacactccagctctgttgtgactttgggcaggtccctgaaggcccctaggtcctggtttcctcctctataaaatgaaagagttggaggagatggtccttaaaatttctagatcaatcgtgttgtgattctgtgccttacgaccatgtggcttgtagaaaattaaactgcgggcatccagccttgagcattgaagggaacaagagcttattgagcatgctgcatgccaggaactctgtgcccatttcacagatggagaaactaaggttcagaatgattaggagccttgtttttttttgtttgtttgtttgttgttttttgagacggagtctcactctgttgcccaggttggagtacagtggtgcgatctcggctcactgcaacccccacgtccctggttcaagcgattctcctgcctcagcctccctagtagctgggattacaggtgcccaccaccatgactagctaatttttgtatttttagtagtgacagggtttcacaatgttggccaggctggtctcaaactcctgacctctggtgatccacctgcctcagcttcccaaagtgctgggattacaggcgtgagccaccacgcctaacccaaattcctatctttccaccctaccttgctgtccttaaaaagtagggaggctggccatggtggttcatgcctgtaatcccagcactttcagaagctgaggcgggcagatcacttgaggtcaggagttcaaggccagcctggccaacgtagtgaaaccacatctgcactaaaaatacaaaagttatcagggcatggtggcacacgcctgtaattccagctacttgggaggctgaggcaagagaattgcttgaacctggtagatggaagttgcagcgagccaggatctagccactgcacttcagcctgggtgacagagtgagacyctgtctcaaaaaaaaagtgagggggagagcatgacccagagaaagaatcaaaaataaagagaagccacagatgggaacattttaagaatatctaggtgggacagtgccagatgccaaaggcaaggtttctgtctcagccttttctgtgactcagtgggttccccccggacaggtcactggtctcacttggccccacccagcatcttcactggtcaaatggatgtaaactcctggctcgcctgcccacctgcctagactcaagggtgaaatgagctggatggctacggtcggaggtgctctgtggctgcacggctcattcataaaacgagggatccaaatccagcatggggtttggctgatggtgacattctgatgtccgtttcctagttgtgacaaatgtaccatggtggtataaactgggagcaacagggtgaagtgtgtgaggaagcctctgtgctgtctttgcaccttttctgataatctacaaatattctaaaattaaaagtttatttaggccaggcatggtggctcatgcctgtaatctcagcactttgggaggtcgaggtgggcggatcacctgaggtcaggagttcgagacctgcctagccaacatggcgaaaccccatctctactacaaatacaaaaattagctgggtgtggtggtgtgtgcctgtaatcccagctacttgggaggctgaggtgagaattccttgaacctgggaggcaggggctgcagtgagcagagatcgcaccactgcacttcagcctgggcgacagagcaagactctgtcttaaaaacaaacaaacaaacaaaaacacacaaaaaaaatttaaattggagaatgagaatatacaagcatctccattccacagccataaactgattgataaattaaactgtataaatgaatagcaaatggttacatcatgagtcatgaatacagagtgatttattcacaatagccatgtaatatgtgggatttaaaaggaactggtacatttatttctactgataccaaaatcttttaaatctatcattgattgaggaaaacaacttggttagacttagtgtccaatatggtagtatttatgaaaaatattaaatcaagaatagaaaaattgcatataaagccagagatagacctcaaatttttttttttttttttttagatggagtcttgctcttgtcacccaggttctggagtgcaatggcgtgatcatggctcactgcaacttccgccccctgggttcaagtaattctcctgcctcagccggtatagctgggattataggcatgcgccactacactcagctaacttttgtatttttagtagagacagggtttcaccatgttggccaggctggtctcgaactcctgaccttgtgatctgcccacctcgscctcccaaagtgctgggattataggcgtgagccactgcactggccgacctcaaatttttatgcctggagattagtaaagggcatggaataatgaaggggaacttttattttattttgtttttgagatagggtctcagtctgttgtccaggctggggcgcagtggtgcaatcatggctcactgcagcctcaacctcgaggtctcaagtgatcctcccacctcagcctcctaagtagctgggaccacaagcacatggcaccacacctggctaatttttaaattttctgtagagatggggtctcactatgttgtccaagctggtctcaaactcctgggctcaagtgatcctcctgcctcagcctctgaaggtgttgggattacaggcgtgagccaccacgcctggcctaattttattcattaaatatgttagaattaagtgttttcccttgagacctgtgagttttttcagtgaaaaaatattcaaaaggtttgtcagtatgtccataaaaaagaagataggaggggagggacaggacccaggagggcagcctacagcctgctctccccgttctgtcctggggcggagtctgtactgcgagttgagcttttcccaaggcgcatgttactcctggagccaagcctagcagtgcagccgcacagtcagggtggggtgggccaggcggagaagcaggctgcagagggggcagggtggtggcctggggatctcagggaagggctatgggagcacggcggtgtcctcagtgctggggctttcaggggccttggtaccgcgagttgactcttgggggcaggaggtcactccatgcaggggcagcaggtgctggccaccacattgtccagcaaggtggcagcagaggcctcctaggtccccttcctaggaaaggagcctgggctgccctgatgagtctcctgtctctctctcncccgcaggatgaagatgagacgctacaagctctttctcatgttctgtatggccggcctgtgcctcatctccttcctgcacttcttcaagaccctgtcctatgtcaccttcccccgagaactggcctccctcagccctaacctggtgtccagctttttctggaacaatgccccggtcacgccccaggccagccccgagccaggaggccctgacctgctgcgtaccccactctactcccactcgcccctgctgcagccgctgccgcccagcaaggcggccgaggagctccaccgggtggacttggtgctgcccgaggacaccaccgagtatttcgtgcgcaccaaggccggcggcgtctgcttcaaacccggcaccaagatgctggagaggccscccccgggacggccggaggagaagcctgagggggccaacggctcctcggcccggcggccaccccggtacctcctgagygcccgggagcgcacggggggccgaggcgcccggcgcaagtgggtggagtgcgtgtgcctgcccggctggcacggacccagctgcggcgtgcccactgtggtgcagtactccaacctgcccaccaaggagcggctggtgcccagggaggtgccgcgccgcgtcatcaacgccatcaacgtcaaccacgagttcgacctgctggacgtgcgcttccacgagctgggcgacgtggtggacgcctttgtggtgtgcgagtccaacttcacggcttatggggagccgcggccgctcaagttccgggagatgctgaccaatggcaccttcgagtacatccgccacaaggtgctctatgtcttcctggaccacttcccgcccggcggccggcaggacggctggatcgccgacgactacctgcgcaccttcctcacccaggacggcgtctcgcggctgcgcaacctgcggcccgacgacgtcttcatcattgacgatgcggacgagatcccggcccgtgacggcgtccttttcctcaagctctacgatggctggaccgagcccttcgccttccacatgcgcaagtcrctctacggcttcttctggaagcagccgggcaccctggaggtggtgtcaggctgcacggtggacatgctgcaggcagtgtatgggctggacggcatccgcctgcgccgccgccagtactacaccatgcccaacttcagacagtatgagaaccgcaccggccacatcctggtgcagtggtcgctgggcagccccctgcacttcgccggctggcactgctcctggtgcttcacgcccgagggcatctacttcaagctcgtgtccgcccagaatggcgacttcccacgctggggtgactacgaggacaagcgggacctgaactacatccgcggcctgatccgcaccgggggctggttcgacggcacgcagcaggagtacccgcctgcagaccccagcgagcacatgtatgcgcccaagtacctgctgaagaactacgaccggttccactacctgctggacaacccctaccaggagcccaggagcacggcggcgggcgggtggcgccacaggggtcccgagggaaggccgcccgcccggggcaaactggacgaggcggaagtctagagctgcatgatctgatagggtttgtgacagggcgggggtggcggcggcccctagcgctatctccctgcctcctgccggctccttggttcttgaggggaccaggagtgggtggggagtgggggtgggggtagggtttccctactgaagcccttgtgaatcaagggtcaggcctttgagctcagaaaatatccctcctgttgggagagggcgcaggccgtgacgtctgggtggcccttatgactgccaagactgctgtggccaggaggtgccactggagtgtgcgtggtggtccctgggtagcgggggagggtaggcaggattggggaagagagcctgcaggatctcaccaggcagcctctggggggtggccaggccgggaaaaagcccaccatttggcatccctgggccttgggctccgtgtgggagaccggcctgccaggaggacccagggctctgtaagtagatgcatttgggtccaggaggaagcgtggacacctcgtagggaagagatgaaaaagccacatcctaccaagaggaggtgctgagggatgctttgcagtgtagtcagaagtgctgggccagatggagacagaactccaccccctgccgcaaaggacaggacctggctgccctgggatgctggtgcctgagtctgtctctgtgcacccctcaggctgtcgtgagccaacacaggggcctggagaaccctgaggagctttccttttggttctaaacccggcgttgacgttccttctccctttcacattgctgtcttgtggactgtgcactcagtccttgcaaggccaagagtccagttgtaggtgtggccttgagggggaagtggggaggagaagactgacatgagtcctctgcacggatccgtctctccctccccatcaccccttccttctgacacccagtcccagctgtccactgtcccaggtgcagtcactgttgtgcccttccttggggcaggctggctgggggccagaaaggggccatgaggctgtcttgggcccaaaaagggacaataaggccagttgtatgcttcctgttcctcatagcttgccttggtggggatgtctttgttggagttgattctgagctgctgtgattaggagaccctgaaatacagtggtttaagcaagatggaagcttgtttctaattagtctagattgagatggcccagagctggtagggcagctctgcgtttcttcatacgcaccttccaattctgggtacacagcggctgctccagcgcccaccctcctgtgtgcatccaagcctgggggaagcagaaatagacaagagggcacacccactttttgctaaaggcatgagccagaattggcaggctcacctctgctggcctctcattggctgggactcagtcacatggccacaagcagctgctagggaacctgggaagtgtagtcttcagcggggccgccatgtgcctggcctcaccttgggagttatcttattgatggaggagaagagaatggatatgggggaccagtagcatctctgggagagggggagggagcagcaataactcagtcgtcggatccagctctcattgtcagagtttccggaacagcttgctcctgtttccctcactgtgcagcccagggctgggggcagtgaggagcttgcagctctgtgggaaggggaaacaccccctcccctcggcccctcagacgctacccaatgatgccggtttgcagagttggcctgtggaatggctcatgtttgtgcgtgtgtgtgtgtatatttatgggcatgggtgcatgcttggtgtgtatttgtacatgtctgtattgctgtgtccctgtaaatacatgcttgtgtatggatggaagaggccaggcccaggcctggcctcttcctcgggcctgtggccacacctcctgcagctccccaaaatgactgaggcagaaagcccttggggagcctagaaagcaaagctaaaggggatgcagggtctgtctgtctgtctgtctttcagtctgaggaatgagaatcctgacctgagggctgtgcagctgagagcccactacctccccagcccctctcggccccagccgcatcatcccacctgtcccctcccccccacctccagtggggctttctccagatgtcttatggttgggggtttcctgatgggccaggagaggagggcatcttcttgcgacagcactgtctgggttaagtgcccagtgagggcatggtgtggggagctggcctcagaggagccgctggtgggcaagcgtgaagtgggctgaggggctctgagccactttgctcccatctaggggactgccccccatggaactcctttgaagtcacagcagccttcctttctgtttgctcttggggctgagaggtggctcaaacactcggggtccctatggctctgggtcaatctaggccaggctgcaccccatggacagggagtctcagggctcctgatcatgcccaggccctggcctggggcctccctccttggcagctttcccacccccacgcccctggcatcctcagttgctatgggatgcccctccagggcaccagctcagggctaagcgaaggaagataggagcagctcagagctgccaggctctgccttcctcacagacctggtggggcaggtcctgttcacagcagcaggagtgaaggcctggccatcggtggagagggcagctgtcagagggctgggggccagggcacrggattgaagagtttcacatatcatcacagcatacactgggaatttggtgggggcagaagaacccagggccactccctcaatatgaagggaaaccaagctgaatgtgaccaccggcacactgctgccatgtcccatgtccacctttctccccgggaataactggccctgagacccctagacccaaggaggcctgtccatgccaagcatccgggaagcatggctggccttatccacccatgggtcacgtcggttcccaggggcagcatgggagatctttgggggcaacagggagagtctgggtggggagacgggacttgtccaagcagaaggcaggaccctgggaaatgcataatgtaaggacatcaataatagtattattttttttgtaagggaaaatcaatatgtacattctgaaatcattttctctgtaaatggttggatttcatttcacccttaaagggatgcttaaaggagaagataatattaataataaaaacagctacaaagtctgaattgtgtgcatgtgtggccggtttgtgggtgctctggggcagggaggggtgggaacaggtggctctggtcttgctaaagacacccttacttctggatccatggggtgcaagaacttcccaaggactggatggccagtggggagagggggctgcagggagcaccttcacttagggatgacgtgtcccccagccgcaggtggaagcagctgggaagtggaggatgctgggctgaggtctggtggaaggaagcagaagtgaaccaggctcctaggaccaggggcacccaccctcctgcaggtgggcagggacccttttggggatctggatgaaggctttggtgcctctgcagagagggggtggttctacaattctgctctggggcatcaaaataagtgctcctgcctcagtagtttttcctgtcaggttctaaatgcctcatccaaggtcacagccttgtagattctggacctggactctcagcaccggactctctggactcccaggagcaggtatctccctcccatgtagccaaccttgaacttgtgcttggacagcacctggagccttgggatgtcggggcttccaaggagcttcctctgggccgggtgggcactggagttgtcctgggggtcccctgtgtgtgtcctaaagacagtctcaggcggtgggaacagacacttttttttttttttgagacagagtctcactctgttgcccaggctagagcgcagtggcgcgatctcagctcctgcaatctccacctcctgggttcaagcgattctcctgtctccaagcgattctcctgtgtcagcctcctgagtagctgggattacaggcatgtgccaccaggcctggctaatttctctatgtttagtagagacggggtttcaccatgttggtcaggctggtctcgaactcctgacctcgtgatccgcccacctcagcctcccagagtgctgggattacaggcgtgagccaccgcgcccggctgaacagacaccttttgagctctgccatggtcccctgttgggtggctgtgcaacctccatgttagatggagagacggaggcccagagatggaaggaggtgtgaccacagtcctggtggccaaagcaagggctcatgttttctgaccactcgcaaagtgtcacgcatgcatcagtctgacacctgcgggctgggactgcttggacttctggccacactcacaaagcccagaaaggtacctgctgcaggtacttggagtggggatggggtgagggttgaattccacagggttgaggaagtggagaagatgtagacaccctacctagccagaagagggcattattgacccacatgccgtttaagatcaagttaacaaccctcaaatcatgtcctatggtgaatcatcatcatcatcatcatcatcatcatcatcatcatcatcatcatcagtatttacagacattattgattaagtgcctattttgtgccaaactctgagctaaaagacatccctccccattatacccattttccacgtctgtaaaaggaccccacagcacctgtgaagtctgctgctaaaaatgaaccacctggatcgaatcccaaggaaacagtacacaaaccggaactgagagacaatctgcaacagactagcttctctcatatgaatgcatttcttgcaattctgtttatctgaagtgtttgcagaaaagcccaaccccgcatcagtttcaccaaccactttccaaattcctatcctggaatttggatggccaagagcttctagaggcaaaacatcaacagtgactcaaatgtttgtcatggtggcctccacatgtagcctggttttcccactcatcccagctgaccaacgtgtgtgagcccagctgagaccagaaaaactgcctagtcaagtccagcctaaatactgatccagtctcatgagcccaattgctgctaagtttcttggtttcttacacagcttaattgtggccatagataactggtacagtttgctttcatttaatgacaacctaaactagtgaggcaaactagaaaaaccaacccaaaccagtgaggcaggcaaggaatttactggtttactaatggtaaagttcaggggtaatgtcggcttcgggtacagtcacattgtcatccagctctcttgtggctgagcacagctccacttcctaacttgcattgtcccaagtctcagacaggtttacccctcatgcctgcaagacggctgcagcagcttcaggcttcaccatctcagctttacgctcagcacaacagaaatagagctcctctctctcagagtcctgggtgtggatctcactgacttgatttaggtcacgtgaatatccctgaatgcatcagtgagactggaggggcttgggatggaatctgccaattcacgtagatcaatcagagccctgtgtctactggctgaggaaaagggaaggtggttctccaaaagaaatctggggcccagatggtacctttggcacagcctcagctgcctccaacaggcctttcaccagccaccagcccttggtcacctccctctcctgggtcctcatctgtaacacaggaccgtcataggacagacctccagcggtgattgtgaggatgctcagagcttggagcagagcctggagcatggtgagagctccatgagcgtgagcactcagcatcgtggccccatttgcaccttccatctccttgcatgtgatgcgtgggtcatgcctcctttcctgggtctgcttcccttagcctctgtgactcatctgtctcgtggctctcctcttcctcctccctctatgacatttcttcctggttgtcttcctggttcctttttccccacgcaccccttcaataagggggctccccagggcttggccctggatccactctctacctgcagttctcagtgcttaccaacgtggagctggatccatctctccagggagtcctctttcctaaggacccagcccatgaagcccgctgcctgctgcacgaagcccccaggtgtcaatgtcacctcaaataccatgtggcctaaatggaactcggcttcctataaaaatctgagcccataaattcctttgtttgtttgtttgtttgtttgagatggagtctcactctgtcacccaggctggagtgcagcggcatgatcttggctcattgcaacctctgcctcccgggttcaagtgattctcctgcctcagcctcctaagtagttgggattacaggtgcccgctaccaagcccggctaatttgtgtatttttagtagagacggggttttaccatgttggccaggctggtcttgaactcctgacctcaggtgatccacccaccatggcctcccaaagtgctgcgattacagttgtgagccaccctgcccagccaaattccttttttaaaaagacaccaccagagggcagcaggtattctctggcccaaacttcctcctctgcaaggccttgcctacagggtaggttgccccccagttattggcccaacctggcccagacttggcactgctattaactgtcacatgggaccccctatggtgtaattagaacctgctacctgtcctgccaggctgccttctgaagacccagcatgcctcacagcaggccctggttagagcactgggccttctagaaggccacacgggacaaggccaggccctcatccacatgagtgtccacaaagtattcaaaggtaacaacctaaaccgggctcggtggatcatgcctgtaatcccagcactttgggaggtcgaggttggcggatcacctgaggccaggagttcgagaccagcctgcacaacatggtgaaaccctgtctctactaaaaatacaaaaattagctgggcgtggtggtgggcgcctgtaatcccagctagtcgggaggctgaggcaggagaattgcttgaacccgggaggtggaggttgtagtgagctgagatcatgccattgtactccagcctgggcaacagactgagatcctgtctcaaaaaacaagaacaacaacaacaacaacagcaagacgagacacatttttctgctttctaggagctcaaaagtgtttgagagtaggcggtgtttcccaggctgggcaccgctgacaccgcaggccagttcattccttgctatgaggctgtcctgtacaatgtagggcgctgaagcagcgtccctggcctccagccactcgataccagtggaacccacctctgcaaatgtgacaaccaaaaaatgtttccagacgttactaaatattgcctggagtgcaaactcactggaggaagaagcagacggttgtggagccctgagcatgtacaaggccagcactttgcatacattgcctcatggaatcctctgggggcgctgccggcactcactggagtgtcagcttttctcccacggaactgagtgatattcagagctgggcccttccattttccagcctgcgaagactaaaggggggatcccaggatttagggagattaagggcatgaattgctcaaaggcatgcagctcctaaccaggatttaggaccaggggctccaatacccttctcattgtgctgcattgtctcctagtgggagggccaggcacagctgtgactggcatctcacttgcttttctttctttccttttttttttgaatctcacgctatcacacaggctggagtgcagtggcacgatctcggctcactgcaacctctgcctcctgggttcaagcgattctcctgcctcagcctcctgagtagctgggattacaggtgcaccccaccacgcccggctaatttttgtattttttagtagagatggggtttctccctgttggtcatgctggtcttgaactcctgacctcgtgatccgcccacctcggcctcccaaagtgctgggattacaggtgtgagtcaccgtgcccggcctcttttttccttttctttctttctttctttttttttttttttgagacagagttttgctcttgttgccaagactggagtgcaatggtacgatctcggctcaccgcaacctcacctcctgggttcaaatgatactcttgcctcagtcttccaagtagctgggattacaggcatgtgccaccacgcctggctaattttgtatttttagtagagatggggtttcgccatgttggccaggctggtctctaactcatgacctcaagtggatctgcccacctcagcctcccaaagtgctgggattacaggtgtgaggcaccttgcccggcttcatctttcttcttttgcgcttccacttgtatatttgcttcttcctccacttagctctcgtggcacagaggtttccaagaagatggtgccaagaccgagagactcttccagtcttgaccaatgaattctccatgagggctgacaccagcccatatgggcctttgtactcattggcaagggcatcccttcctccagacattttacttccatttactggaaaactgccatcgtgcactgatttcgttagaatgataaactgccttctgccaaagaaatgtcgtaagaaacatacagttctacaaggtcttgatgtgaaaggtgccccttagatgtggtacctttgtgcagtgtgtgacatgaacaactacgcccagcagccctgccttgcctcacatcctagctctgattctatcactacccccaactttttttttttttttttgagtcagagtcttgctctgctgcccaggctggagtgcagtggtgtgatcacggctcactgcaacctctgcctcctgggttcaagcagttctcatgcctcagcctcctgagtagctgggattacaggcatgcacccccacgcccagctaatttttgtatttttagtagagacggggtttcaccatgttggccacactggtctcgaactcctgtcctcaagtgatctgcctgccttagcctcccaaagtgctggggttacaggcatgagccactgcgcccagccactacaccccaactttaaa

SEQ ID NO: 94623 - DNA, 29546 bp, Homo sapiens
aagctgataagcaacttcagcaaagtctcaggatacaaaatcaatgtgcaaaaatgacaagcattcctatacgccaataacagacaatagagagccaaatcatgagtgaactcccattcacaattgctacaaagagaataaaatacctaggaatccaacttacaagggatgtgaaggacctcttcaaggagaaatacagacactgctcgaggaaataagtgaggacacaaacaaatggaaaaacattccatgcccatggataggaagaatcaatatcgtgaaaatggccatactgcccaaagtaatttatagattcaatgctatccccatcaagctaccattgactttcttcacagaattggaaaaaactactttgaattttatatggaaccaaaaaagagccaatataatgaagacaatcctaagcaaaaagaacaaagctggacgcatgatgctacctcacttcaaactatacggcaaggctacagtaaccaaaacagcatggtactggtaccaaaacagatatctagaccaatggaacagaacagaggcctcagaaacaacaccacacatctacaaccatctgatctttgacaaacctaacaaaaacaagcaataaggaaaagatttcctatttaataaatggtgttgggaaaactggctagccatatgcagaaaactgaaactggaccccttccttacaccttataaaaaaattaactcaagatggattaaagacttaaacataagacctaaaaccataaaaaccctagaggaaaacctaggacataccattcaggacataggcatgagcaaagacttcacgactaaaatacccaaagcaacagcaaaaaaagccagaatagacaaatgggacttaattaaactaaagagcttctgtacaccaaaagaaactataattagagtgaacagagaacctacagaatgtgagaaaatttttgcaatctatctatctgacaaagggctaatatccagaatgtacaaaaaacttaaatttacaagaaaaaaaaaccatcaaaaagtgggctaagaatgtgaacagatacttctcaaaagaaaacatttatgcagccaagaaacatgaaaaaatgctcatcatcactgctcattagaaaaatgcaaatcaaaaccacaatgagataccatctcacaccagttagaatggcaatcattaaaatgtcaggaaacaacagatgctggagaggatgtggagaaataggaacgcttttatactgttggtgggagtgtaaattagttcaaccattgtggaagacagtgtggccattccacaaggatctagaactacaaataccatttgacccagcaatcccattacagggtatatatccaaaggattataaatcattctactataaagacacatgcatatatatgtttattgcagcactgttcacaatagaaaaaccttggaccaacccaaatgcccatcaatgatagactggaaaaagaaaatgtggcacatatacaccatggaatattatgcagccataaaaaatgatgagttcatgtcctttgcaaagacctggatgaagctggaaaccgtcattctcagcaaactaatgaaagaacagaaaaccaaacactgcacgttctcactcataagtggaagttgaacaatgagaacacatggacacagggagggcaatatcacacaccatggccttttcaggggggtggggggctaggggagggatagcattaggagaaatacttaatgtagatgatgggttgatgggtgcagaaaaccaccatggcacatgtacacttgtgtaacaaacctgcacattctgcaagtgtatctcagaacttaaagtataattatttaaaaaaagaaattaaaaagtggggattggagcatagaagaaagaaaagaaaagaaatttgaaggacagtatgtatagtgtcatttcaattgtggaaaaaatttttaaaagaaaaatgcatgtaaatgtacaggaaacttctggaaggatacacaaagccaagagctatatgggaagaaggtaaaagaaccatagggaagagttaccttttacttttcaaataattttctgtccctttttaaaataatgtgttatttatataatttaatgagtagatgtgttgatttgaaaaacacactgatcctgaaagtttaaattccagttgagagaaaattgatttctatgaaaactatggattgcccaacaatgccagaaaactgaagtgtaactatgcaacacacacagtggtcaaggttgtcatcagtcactctgatttcacatagagaatttaaaacacctaattgggtgcagtggctcacgcctgctatcccagcacttttggaggccaaggcaggaagatcactaggtcaagggatcgagatcatcctggccaacatggtgacaccccgtctctactaaaaatacaaaaattagctgggtgaggtggtatgcacctgtggtcccagctacttgggaggctgaggcaggagaatcacttgaacccaggaggcagaggttgcagtgagctgagattgtgccactgcactccagcctggcgacagagcaaaactctgtcacaaagtaaaaaaaaaaaaagaagaagaagttaaaatgccacagtccttggtggacttaacaaaagaagatgaatgtgggaataaagacaaagacaaaagagtattttggaagaaggggtcaggaggctccttgcttctagtgaagaagggccctgagcttctatagccctttgtatttattgagtaaaggagatagggagaagggggtagttgtcagtcagctgcttggcttagtgcaggcttgcatgactgcattctttgaacagtagtctccagatgttcctgtagataacctcaaggagcacagcaccagggagtcattgccctcagcaaaccttctggtagcaggcgcagaagtgagtttgcccacattctgcattcatgataaacagtttgctgttagatcatacagccttcagtggaatgctgagttggtcacgaccctcaggcctttggctccctacattaaaacacccatttcaccagactaaaaatattcaataaaatttataaaaagcacttaacgcttgccagcatttagtaaggaagtgctcaataaatactgttaacactcttactattactttctctgcttggtagttgtcctaaccccacaccagccctcccacattgcctaattctgacttgtgtcagtgatgcaggactcgactcaatctaggacagctattgcaaaacgcaagacttaaattccaccccaggtgaaatctcttctggaccgcaggcagcccttgaaaaggatgggagtagtgccctcactcatgaaggcatttgtccctcaagataggcagatgttaccacctccatgtaagaacaatcccattgcctgttacagttcccatttcaaagagatactcccacatatgcatgtatttccctgaaagatttcccgttatttatttatttatttatttatttatttatttatttatttagatggagtctttcattctgctgcccaggctggagtgcaatggcatgattttggctcactgcaacctctgcctcccacgttcaagcaattctcctgccacagcctcctgagtagctgggattacaggcacatgccaccaggcccggctggtttttgtatttttagtagagatgaggtttcaccatgttggccaggctgatctcgaacttctgaccacgcccagctaattttcgtattgttagtaaagaggattacaggtgtgagccaccatgcccagcccaagatttcctgttcttatctccaataagcgagcttgatgaggagtagtgctagagagtcccatacttcttgacttccttccatccttttctgctcacaggccccctccctaatgtcccctgtgctctccacaaaagaaatagtgctagaggccaaatagcaaccctgcccacacaaggaagggccatgtaatgttcaccaagcacccaagccacaattctctcttcccagaatcctttgctctttgaagtgtagtcttcctcaccttcctgccaacctcagcccctgagtccacctgtctacctctgaagagaagggaaagagagatcaaacgccccctgcaggcctgtccctttgaaccaagccctgagaacccccgcagccgtcctcctgtgtaccctcccccagccgcacacacagatggagagccctgggaagggttcccacagtgcgttagctccaaacagtgcaagaggacaagcagtgtggcgcttccagcctctgtcaataattcatgaggctcagactgaggagcaccagtcagagtcagccttccctggacatggggaaaattatactgaagctctcctgtctcatcgggatctgctgagtagcaaagcagagtattgcagctgtaacttcttggctgaggaaaacactagaattccagtgcaggccgttctattacttgctcaccatacacccccttttgaatgttgaaaccctttttcagctgctcagcttacctgcacatatactaaatgaatcttgagcaaacatgaattctattcaaaagtcatgcctagaactggatttcacaaaccaggattctttcccctttaattgtagggactggcataaggctgccaaactggtgatttcaccaataacacatctctaaacctacccatctgctttcatcatcttttctaaaagaaaacactaacacacacacacacacacaaaaagaagcaaacgtatactccacaataaaggactgttaaataagcttagctttatgaaactcactgtaattgtttccttttctcattttgccttgaactagtgaaaacgctgccatgaaccagcactgcttctcagtctggctttggaggccagtgggttaaaccaattcagatgcttgcatttgggtctgttggggcctttctacactgtaccataagccatccagatttcttcattctcccggaaacccaggagggagatcatttcagcccacttggcagaagtgcagactgaagtcttggacacagaatttatagctggcaaggactttattcatcatccataccctcagtaatttacagatgaagagtctggcccagggcaccaataataatcactacatggtggcagtaactactatgtgcttagtagcttacagttcataaagagattttgcattcaacaaatatttattgaactaagatggcggctaagacctggggacagagtggttagggagaacttgagtgccccgagttctttgcatttccaccactgcttgagggactgtccagcctcctcgctaccacttagcccctgtaaaggaggaagtccctttgtcaacggacatgagaatgctgtttggccaatgaccatagtctgccctccagggcccgtgaagatggaagagaccttgggcagagtgaagggcagtgccaggcctggcgcagctactccctatcacgtctctctcccaggctcttccagcctcacctggtggactccatggcgaccacaggcctcacctccatgggcagtctcaaaacatttgccctcctgtgggctgtcacacacatagacccagactttcttggagaaggaattctgaagaagcaaaagcaaccaactcaaaacccccacttcccagagaagaaaaggtgggcaagcagatgcagaaaggcagcagccaaagcctgcgggttcctgcaagggccaggggaggggcgagccctacaggcaacttgaacggagagctcacccgccagcccggraaggcaagccccagtcaggcggaaggtagatggtggaggggcgccgcggcggatggaggtgcccagggccacagaccgctcacagcggtaccggggcggggagcagggcgggcagggaatcggcccgcccttcgtcctgcccctcgccctactctgtcaccgcccctgggaagagtggaacccatacttgctggtctgakccatgcacaagrcgrggctgctaggcctctgtgcchgggcttggaaktcggtgcggatggccagctccrggatgacccrccgggacccgctcgcraataaggtggccctggtaacggcctccaccgacgggtgagtgctccggccggagtttctgaggccctggctgcctggaaacaggcactggcctctcatcctcggcctccggtgcccctgtcctcagaccttacacgctgccaaagtctggccctggaaaaaaggtagccacgtggtccgcctgaagccactccgaatcccctagccctggaccctcccttgccagccctcctgtccctgctacctctggcacaactgtgccacctctgtgcagccctatcgatctagtctccccagtgttctgggctgccccagtcaaccagcgccacctagcgtctgggaagaccagaaactggaaatccaaggaaatctggatttcaaaatactatcccacggcctccagcactttgaaaatgtaccagacattctatttgggcaccggaaagtcccccggaacccctcccccttacctagatgggacaccagagccatrtgtcgagatttttgtttaggtcggtacatctgggccgaccttgcccagcctgtttctcacccaccattcttgtctatcctggtyctcatttctacaggactttgctagatgccagctcttcacaaaactaaaatacaaatgtaggtaaaatgctaatagctgacaaatgcaaaatgtgtaactcttcctcccaaggcaatatttacatttttgaccggagaccatcttttcacatgcaccccaaaaaataactaaggatagaattttgagaatgatgtagacgagtaagaaagaaacctgggggcagggctgttctgagtgagaccctcaaatcayggaagtggctgctgctgcaaacccagctcatttctcacctctcagtcccaagaggggatgaagcctgtcacccatggtgggaactgtagaaagtgatgtcagttcttgggaactgaggctgtggtccaggtcataataaaaacaagtaaaggaatgccaaaaatggccatgccattaagcctgttttacacatagtaggcacacgtaggggttatatagagaaagagccagaattcaaacccgggcagtcttaacttcagagctcatactgtcgacctcttcccctgcacaggccttagcagtctttgtctctttctgctcacaggatcggcttcgccatcgcccggcgtttggcccaggacggggcccatgtggtcgtcagcagccggaagcagcagaatgtggaccaggcggtggccacgctgcagggggaggggctgagcgtgacgggcaccgtgtgccatgtggggaaggcggaggaccgggagcggctggtggccacggtgagctgcagggaaatgggcacagagccaggaggtggaaaacggagccagcctgagcctccttccctgctttcctagacagcagcacatttttactgtgtgcctttctattatgtccatatactaacgtcagagaatcatcccatctcagtcagagaattttaaaacattctaatgcttcaaccctgcatcatcccttgagtaccccaaagaaacagctggtactggttctgcagtaattttcaatctaattgaacagatgtgaagggtaaatacaatcacaaaatacatgttcccacccatgagttaataaacattcccctcttcttcagcttatagagtcaagtccctgggaacctcaggaagcagcccaccatgtttcagccacttactatgtgccatttcctgtgttcagagccttacacaggttatctctagacctgacaacaacccaagcaaggcaaggactattctctcagtctgcagaccctggctcagatagctggagcaacttcccaaggtcccacagccagtaaggaaagacccagacctcccaggctcccttcctttattggctgcctgtggactaccgggtactggactttagtctcaaagaaagtatataagtcgatgtcakaattagtagtggacaccagccttgcagctgctgaagcaaatatgaagcattcacaaaggaagctcctcttcccttgaggctcacggcatacactttatttcccagagtggaagggagaatctacccaaaaatggaaagtacaggattctgctaacagattggaaggttggcagaaataatttgcataatcttagaagaggaggatcttaagcaatagtagacagtagtatggtagacagaatagggtaattccatttttaaggaactgtctggcaaatgctcaaatgtgcattggaaagagccaaatatgagtccaagaaagtcacaaatgtgagtccaaaaaagcttggcttaggctgatggacagascccaagattggggccttgatcctgatggtggaaggagccgtttgggagtctggatcaattagcactaaccatatgacatgtagcaatgtaatgtgaaaatcctcccggaaaaacatcctgtggcccccaccaggttcacttaacatggcctacaggcctggcccagaggtggtacttgagctaaaccttaaggaatggatgggaatggacagatggaatagtgatgaggttccagataactctgcaaaatgagcagacagccaaggaggaactgaaggaaacagaggagcactgtcaggccacagtggagagcacaggctcaggagtactgctggggaaggggctgcattggaaagatagaggccatgggcctccatatccttttttttttttttttttttttgagacagagtttcattcttgttgcccaggctgaagtgatatggcacaatctcagctcactgcaacctccgcctccaggttcaagcaattctcatgcctcagcctcccgagcagctaggattacaggcatccaccaccacgtccagctaatttttgtatttttggtagagacagggtttcaccatgttggccaggctggtcttgaactcctgacctcaggtgatccaccccctcggcctcccaatgtgctgggattacaggcgtgagccactgtgcccggccatagcttcttaaaaggatacgttaaggaccttaaaaggatatggcctcttaaaaggatatgtttacacacccttgtagcaaataagaagccatgtgaggttttgagcaagagaaagatggttattaggaaagctaatctggctctggtaggaaggatatacagaggagacaccgaatccagggcatcagtgaggaagctgttgctgtcctccaggtttagagcagtggcggtgggactggaatagatgtgcccaagagacattcagtggaaacgaaccaagattttccaaccccatgtcaaaaagtgggaaatagagaagtcaaaaatgactctcaagtagtttgtatgaccattgtcagagaggagaatgatagaatacttgtcagcaatttgaaatgtcttctgccagttgccacatgttaccctgcaatgagaaaagccactttcctgagaatggatactacccagtggcctcctcatctggacaccacgaagcttctcactggtgttgtaagtggaaaccagagtagctgcctatctccttgattatattttttcttaaaaatgtataactatcagaacacagaacaaacagctcctaaccgctttggtgtagtgatcacacaatttagaataagacttagaagactttccttttttttttttttccagagacagggcctccttctgttgcccaggctgcagtgcagtgacatgatcatagctcactgtaacctcgaagtcctgaactcaagcaatcctcccacctcagcctcccaagtggctaaaactataggcatgcaccaccacaccagttcattttttaaattttttgtaragttggggctgtatttcccaggctgttttgaactcctggcctcaagtggtcctccccactgggcctaccaaagtgctaggattataggtgtgagccaccacacccagcctcattcatcttttatggtttgctgtctctgttcaatcaaaacccagcctcctcccatctctgtgctgacagacctggaaggagaggagtatggggtatacagcagagtagaaaatgtctccaggtgattctagagcaatccattgtctcctcccagcccaaacacatgtgtactgagcacggcgcacatcacttattaacttactctgcacctccctagtaacaagtccattggtgagacttacacagagccaaggcaggtgacttggctttgtgccaggataccaaaatttaaagggtgcaagaaagtattaatactggttttaaaagattatgtgactgtaaattttgttagatttacacattgacagcccagcattccttcaactgtctagaaacaactgagcttagcacctagttaacaagaataattagttaaaacgggaagctagcagatggtgtacattgttagtaacacccctctgtgtgccaaatccggagcacaaagttgaccgagggcccgtgtactgcaacttgcccaaggcatcaaaattgccagttccgggcaaacggaaagtctggtttcagggtggctttgtactgaaaacccttgttggcagattctgcttggccattcattactctagcacaggcctcactatctacttataacttattaaggaggtgagatgttgcctttcttcgccttctcaatttaaatttcagtttctgccttgaatctttcatgcctccaggtcaaaagagagagacagagacagggaaaatgacatcataaccaaatatggaattgctttaaattcaggctggtatcttctcccatcacggctctcctgggcaaccagtttcctgatgaccccaactcactttcagagggctcttatgaattagctctgtgctacaaagtgggagactgacctcagttcttccaccactaactagctttgtgccctgaaaacatcacttcacccctcccaaacacagaataagcaggcctcctgttcttacctagccccagtgtgccactactgaactataagatcttgagaaaattctctgaacctgtttcatcatctccaccttaaggacactggaatagatgatctcaaaggcccctccagggtaactttctacagctctatttaagccagtttttccattcaggtaagtgtggacagattgactttgagataatggtaacttattcaaggagaactggacagtaagcacttggagaaatgtgggtggaactcagtgtgaaaggaagaggaggggtctggaaatagattttggggtgagacttgaaatcatgagaatgaaggagcttcccaaaggggaagtgtaaagaaaagagcgtcagagacagccttggaagaataggaggtgggaagaaaacactgcaaaagaaatagggccaacttcctggtgggtcgcgcctgtaacactttaggatactgaggcaggtggatggcttgagcccaggagttccagaccagcctgggcaacatggcaagaccctgtctctataaaaaatacaaaaattgcccgggtgtggtggcacgcacttgtagtcccaactacttggggggctgagccaagaggatggcttgaacccagtaggtcaaggctgcagtgagctgagaacatgccactgtgctccagtctggatgacagagcaagactccgtctaaaaaagaaagaagccaaccttaaatggttagcggcagatcttagggtagttttcaaaaaagatgttttaagaaatagaagttattttgacgatagttcctaagtaggaagattttgttgtcattgttgttgttgtttttaatataaagataaggtctcgctgyrtggcccaggcttctctcaaaytcctcagctcaagtgagcctcccaccttggcctcccaaagtgcyatgattacaggcatgagccacagctccttgcccagaaggaagtttttatcaacatgggtaaatgcacctcccttacttactgcagccctggtccagamcttacccctctctctaggctgtgaagcttcatggaggtatcgatatcctagtctccaatgctgctgtcaaccctttctttggaagcataatggatgtcactgaggaggtgtgggacaaggtgagaggggattaaagcaggggggccggggggggcgccttggaacacattcagcacaaactccatctgcttttagaatgcatttstcaagggcagtgtaaatgtgaggactctttgccacrtgccacacacctggagcacaccttgcaaagggcgggtgggggtggctctatccctgcccttctcattcgtttctgctrctcctagttctctctgcttctatctgctcttcactagccacagtctgctcctctccccaggcttyttccctggcatgctcttctgccttgttgatttccaacagagacgtaggcagctaatatgccaacaactacaacacttaatttacacacccacctgtccccttttcagctgacaaaaagtaattattttttacragttgggaaatattaaatgctgctccttatttaaaatactaattctggtgaaatgaccagttgccactttataacatacatcctttaaaaaaataaaataaaaacctatattattttcttcttaactgcaatgtcaagaaaatctgagatccagatgtctaaattcaagtggtagaatattgggttttatgtgaaagtgtataattacattatattcgtaatatatttcacacacactctttaattacaaagctttaattaaaatatttgtctttgtttattaaggttaatattcccacatgattgggaaatgctaatttttatgatctcccatggttctgcgttttacactgatgttgtattagtctgttttgcattgctataaaggaatatctgagctgggcaatttataaagaaaagaagtttgttttggcttacgatactgcagactgtacaagaagcatggtgccagtatctgcttctgatgaggcctcaggaagcttacaatcatggcagaaggaaaaagggagcaagtgtgtcacatggcaagacaggaagcaagagagagataccagtctcttttaaacaactagttctggcatgaaataatagagtgagaactcactcactgccacagggagggcaccaagccattcataagggatccaccctcatgacccaaacacctcacaccaggccccacctggaacactggtgatcacatttcaacatgggacttagaggggacaaacttaccaactatatcaggtgtcatcaaaatttctcaacactaaagtatcaggttgccaaaatactatgatttatttaccagtgtttcatacacataaagaccaaactgccaaaatgttcttcagtgagctagtttttgattctagtttgagctagtttgagagaaggctgggcaacacagcgagaccttttctctatattaaaaacaacaacaacaacaatgacaacaaaaccttccttcttaggaactatcatcaaaataacttctctttcttaaaccatcttttcttcaaaactacccagagatttgctgctaaccatttaagtttggcttctttctttctttttttagacagactcttgctctgtcttttttccttttttttttttttccccctcgctgtgtcattgaggctagagggctgtggtgtgatctcagctcactgcaacctcagcctcccaggttcaagcgattcttgtgcctcagcctcccaagtacctgggactacaggcatgtgccatcatgcctggctaattttttgtattgagatgcggtttcactgtgttgctcaggctggtctcaaattcctggcctcaactgatccccacacctcagccccccaaaatattgggattgcaggcatgagccaccacacacagccagattctgatagtctttaaaatagaggagcatcattcatgaacagtctgaatagagaccatatgaaagtcagttttaaactaagtacaggcacgcctcagagatattgtgggtctggttccaggccaccacacaataaagtgaatattataataaagtgagtcacatgaattttttggtttcccagtgcatataaaagttaggtttacattataatgatcatctaatggaagtctattaactgagcaatagcattatgttttaaaatatatatacgtatcttaattttaaaatactttattgctaaaaaaatgctgacaatcatctgagcctttacaacttgtaatctttttgctggtggaggatcttgcctcaacattgatggtggctgacttagggtggtgttgctgaaggctggggtggctgtggcagttttttcaaataagacagcagtgaagtttgccacatcagttgactcttcctttcacaagagatttctctgtagcatgcaatcctgtttgatagcatttacccacagtagaacttctttcaaaattggagtcaatcctatcaaactctaccactgcttactctactaagtacctataatattctgaatcccgtgttgtgatttcaacaatattcatggcatcttcaccagaaatagattccatcccaagaaaccactttctttgcttatccgtacgaaccagctcctcagccatctacattttatcgtgagattgtagcaattcagtcctatcttccagctccgcttctagttctcttgctatttccaccacatctgcagttccttcctctgatgcagtcttgaacccttccacgtcatccatgagggttggaatcaacttcttccagactcctgtaaatgtagatattttgacctcctcccatgaatcacaaatattcttaatggcatctaaaatggtgcatcctttacagaaggttttcagttaactttgccaacatccatcagaggaatcactatccatggcagctatagccttacaaaatgtatttcttaaataataagtcttggaagtcagaattacccccgatccatgggctgcagaatggatgttgtgttagcaggcatgaaaacaacattaatctccttgtacatctccatcagagcttttgagtgaccaggtgcattgtcaatgagcagtaacagtttgaaaggaatctttttctgagcagtagctatcaacggtgagcttaaaatattcagtaaaccatgctataaacagatgtgctgttattcaggctttgttgttccatttgcagagcacaggcagagtagatttagcgtaaatctgagggccctagaattttcagaatggtaaatgagcattggcttcaacttaaagtcactggctgcattagcccctaacaagagaataagcctgtcctttgaagttttgaagccaggcattgacttctcctctctagctattaaagccctacatggcatcttcttccactagaaggttgtttcatctacattgaaaatctgttgtttgctgtagccaccttcatcaatgatcttagctagatcttctggataactggctgcagcttctacatcagcactcgctgcttcatcttgcacttttatgttacagaggtggcttcttaaacctcatgaaccaaccactgctagcttccaacttttccggagcttcttcacctctctcagccttcaaagaattaaaaattagggcctttttctgattaggctttggcttaagggaatgttgtggctagtttgatcttctgtccagaacataagaactttctctccatattaacaataaacctcttttgctttcttatcatttatatgttcagagaagtagcacttttaatttccttcaagaatttttcctttgcattcacaatttggctaactggtgcacatggtctaactttcagcctgcctcagctttcaacatgccttcctcactaagcttaattgtttctagcttttgatttaaagtgaaagatgtgtgactcttccttttgcttaaacacttacaagccattgtagggttaatagttggcctaatttcaatgtaaatgtgtctcagggaatatggaggtccacagagagggagagagatgagagaagggcagagcagtcagaacacacaacatttttcgattaagttgaccttcttttctgggtgtggtttgtggtaccccaaaacaattataataaaaccatgaaagatcactcatcacagatcaccgtaacagatataataataatggaaaggtctgaaatattccaagaattaccaaaatgtgacccagagacaaagtgagcacatgcaattggaaaaatggctcgaattaatgcagggttgccacgaaactccaatttgtaaaaaaaaaaaaaaaaaaaaaaaaaaaaaacaatatctgcaaagcataagaaaatatgtgtctataacttttcttttaatttgtatattttttaaactatcacagtatgtcaaatccaaacataatggctgatccttgattgaactctggactttaaaaaacacacacacacatttgggggataattgaggccaatatgttagataaaattatcatcattgtcaaactcttggttgtgataacagattatggttgtgtaaaagaaaatccttactctttggaaatgtatgctaagtatttggggatagaacattgtactatctgcaactgagtttacttattttattttaggttatttatttatttttgtgatggagcctcactctgttacccaggctggagtgcagtggtgctatctcagctcactgcaacctccacctcccgggttcaagctattctgctgtctcatcctcctgagtagcttggattacaaacacatgccaccacgtctggctaatttttgtatttttagtacagacgaggtttgccatgttgcccaggctgttctcgaactcctgacctaaaagtgatccacccatcttggcctcccgaagtgcagggattgcaggcatgagccaccatgcccagccctgagtttttttttttttaatttacatttttttatttttgttctttgtaatttttgattttattatataaaatctttcagaaaacttgcaactgagtttcaatggttcatttaaaaaactgtacagatctacagagaggacaaataggacaaaatgtgaacaattggtgamtctaagtgaaggatatctagacattcattgtacttctatctccaatttttctgtaagattgaaatattttaatataagcagttgtctagaacagtgtaaacagggtcatacatttgttttagattatggatgtggggattctgattgtagcctgtcccccagcttccccagaaggtgactcctcatgatcccactttctaaccatgcctagccagacagtccttcctagagggccaagaacatctcactccctaagcccagaagccagagaagtgctagaacaaccccacatatccaaggtcaggccacattttccctgagaagcatggcctactctagggcaggtccaggaggctgacaattccaggctctacctacttggaagaaacagagaaaacacagctcaaatccaaaggccccttctggcccaaatcatacttggctgattatgaaacaagatgaaccaggctccatttttgctcacctgaacctaatgtatcawtatctagctgagcagctggtgagagctacttctccctgaacctcagttccttcatgtgtaagatgcaggtatatcatcctaagatcttcgtcagctctgacaaacatcctaggaacccactctaactcctcattttttcatgcctcctccagtgctcttcactcatgctgtttccccttcttctcttggcttcagactctggacattaatgtgaaggccccagccctgatgacaaaggcagtggtgccagaaatggagaaaygagggtacagagagtgagagagagcctgggtgagaggggacmccacacrggctgagggcagtggtccacamtgggaagayggtcagctctcttctttttccagaggcggctcagtggtgatcgtgtcttccatagcagccttcagtccatctcctgtaagaacccttttgtctacctcttccatcccaccctccactccacatctttccacccctcctattacccaaggaagtttgtgtccccttgtagaatcacaccaccaagtccctgcccacaaaatagatgccttgcctccacaaaccataacctaggggaggtttagccacaagacagttccctaactctgcccctcccttacaggagatccctactgagcactgccctctatgtctagttattagaaccaagaatgacctggaaactatgagtctaacacattctcttctttctccagggcttcagtccttacaatgtcagtaaaacagccttgctgggcctcaacaataccctggccatagagctggccccaaggaacattagggtgaactgcctgcacctggacttatcaagactagcttcagcaggatggtgaggaaggggagctttgcatttgactgggaccccttgaaaggcatccatcttcttggacagggaagcccactacctgagtcctgagctctcagccactccattctccttccctggactttcccatattccctctctgtaccacctgccctatacaagccacactcttatcacaccttttctgaggtataggctggagactgaggtattcagactgtactcacactgtttcctccctccttacatggatgagaattggagagacgcagcaaaatgcatcactagaacctgaaacaaatgaaacagatgagggcagtggggagagctgggagctagaaaaaaataggaagtgaaagagggaagtctctcaccccatccctcctctcagttaccatgaggatgggcagtttcttccctttccattcttcactttcctcttcttttttttttttttttcttttttaattattattattattatactttaagttttagggtacatgtgcacattgtgcaggttagttacatatgtatacatgtgccatgctggtgcgctgcacccactaacgtgtcatctagcattagatatatctcccaatgctatccctccccactcccccgaccccaccacagtccccagagtgtgatattccccttcctgtgtccatgtgatctcattgttcaattcccacctatgagtgagaatatgtggtgtttggttttttgttcttgcgatagtttactgagaatgatggtttccaatttcatccatgtccctacaaaggacatgaactcatcattttttatggctgcatagtattccatggtgtatatgtgccacattttcttaatccagtctatcattgttggacatttgggttggttccaagtctttgctattgtgaataatgccgcaataaacatacgtgtgcatgtgtctttatagcagcatgatttatagtcatttgggtatatacccagtaatgggatggctgggtcaaatggtatttctagttctagatccctgaggaatcgccacactgacttccacaatggttgaactagtttacagtcccaccaacagtgtaaaagtgttcctatttctccacatcctctccagcacctgttgtttcctgactttttaatgatcgccattctaactggtgtgagatgatatctcatagtggttttgatttgcatttctctgatggccagtgatgatgagcattttttcatgtattttttggctgcataaatgtcttcttttgagaagtgtctgttcatgtccttcgcccactttttgatggggttgtttgtttttttcttgtaaatttgtttgagttcattgtagattctggatattagccctttgtcagatgagtaggttgcgaaaattttctcccatgttgtaggttgcctgttcactctgatggtagtttcttttgcggtgcagaagctctttagtttaattagatcccatttgtcaattttggcttttgttgccattgcttttggtgttttggacatgaagtccttgcccacgcctatgtcctgaatgataatgcctaggttttcttctagggtttttatggttttaggtctaacgtttaaatctttaatccatcttgaattgatttttgtataaggtgtaaggaagggatccagtttcagctttctacatatggctcgccagttttcccagcaccatttattaaatagggaatcctttccccattgcttgtttttctcaggtttgtcaaagatcagatagttgtaggtatgcggcattatttctgagggttctgttctgttccattgatctatatctctgttttggtaccagtaccatgctgttttggttactgtagccttgtagtatagtttgaagtcaggtagtgtgatgcctccagctttgttcttttggtttaggattgacttgccgatgcaggctcttttttggttccatatgaactttaaagtagttttttccaattctgtgaagaaagtcattggtagcttgatggggatggcattgaatctgtaaattaccttgggcagtatggccattttcacgatattgattcttcctacccatgagcatggaatgttcttccatttgtttgtgtcctcttttatttccttgagcagtggtttgtagttctccttgaagaggtccttcacatcccttgtaagttggattcctaggtattttattctctttgaagcaattgtgaatgggagttcactcatgatttggctctctgtttgtctgttgttggtgtataagaatgcttgtgatttttgtacattgattttgtatcctgagactttgctgaagttgcttatcagcttaaggagattttgggctgagacgatggggttttctagataaacaatcatgtcgtctgcaaacagggacaatttgacttcctcttttcctaattgattcctcttcttaaacataaagagatttctgggtggggtggctcatgcctgtaatcccagcacattgggaggccgaggcgggcagatcacgaggtcaggaggtcgagaccatcttggctaacacggtgaaaccccgtctctactaaaaatacaaaaaattagccgggcgcagtggcgggcgcctgtaatcccagctactcgggaggctgaggcaggagaatggcataacccgggaggcggagtttgcagtgagccaagatagcgccactacagtccggcctgggcaaaagagcaagactccgtctctaaaaaaaaaaaaaaaaaaagaaaggaaaagaaaaaaaaacataaagagatttcccttcttcctacagctctggatggacaaggaaaaagaggaaagcatgaaagaaaccctgcggataagaaggtaaactgtcatgagggcaagggcactaagagacatgaagatgggaaggtctggtccctagcagcccacagcccgctgtctcagtcccacagataacacaggcaggctctcttctgcctcacagaccacgaattcataaacactatcactacagtgacctgagcaagaagtcagcttccctttccaaaggtaaacacagagacatcggggtttcagcagtgcagaggtctcggagaagccctgagtcctctctccacctgggggattgcctccacctctgagcatccatggagaccagggaccataaccaaaaccatgctttgttagtccccttgaataatgacacatgtttacaaaactcaggttgatgatctacaatccaaatgaaaagaatgaagagttttactaagccccaaactccccttgcctaaggagttactttcttccccagtgagctgggtgaactgttcaagcacctttgtcgggctccctttcctctaagttccctgcctctctctaccttctggcttcaaggacaaatgccagtaatgcctaactctgtactcgtccagacatcccaaatcttcccaaagccattctgatgtgagacatgagctgcaggcctggttcataactcattaataagtgaggggattgtcaacctagagcaccaatgaatgatctagcccatgtagctcaatactggattcacattagaatcacctggggagctttttaaactgcaggtgctcaggccccacccactcccagagattctttttaattggtccaaggtaggacttgaccatctgggcttttgtttttctttgtcttttcttttcttttcttttttggtttaagcctctcaaatgattgcaagatacaagtagaatggagaagcattaattcagcccttctaggtttgagttactcactctgcccacctctagagcattctatggcagggagattaaagtgtctcctaactatgcagtcactgataaaataagaattagcacattctcactaaatgaacctgactttaaggcacaagtatagattcctgaaaaagttctaagctgaacctgtacaaatggaatcattttaaasacaccatttactgtcacacagactccctgatactttagtgtgtgcacatgtgaaaccatttttttgaagtatgaaataattgctcaccattttatctatataactttggattttggtgtcctgagctctctaaaaaccggtgtgtttctatagtatttgaatattatgggtaatagttttgcagagtacagtatgcttatactaaattataacagcatatcctcgtggtaaccctatttgataggcagaaagcttgtacactgatcctgaaaagtcatctgataattcttgattaagcaaatttaactccccgtgtcccaggtgagggaggcagacccgtttgatttttacctccttccttgcttcccttattccccaggttaggcgagccagaggattgtgctggcatcgtgtctttcctgtgctctgaagatgccagctacatcactggggaaacagtgrtggtgggtggaggaaccccgtcccgcctctgaggaccsggagacagcccacaggccagagttgggctctagctcctggtgctgttccygcattcacccactggcctttcccacctctgctcaccttactgttcacctcatmaaatcagttctgccctgtgaaaagatccagccttccctgccgtcaaggtggcgtcttactcgggattyctgctgttgttgtggccttgggtaaaggcctcccctgagaacacaggacaggcctgctgacaaggctgagtctaccttggcaaagaccaagatattttttccygggccmctggggaatytgaggggtgatgggaragaaggaacctggagtggaaggagcagagttgcaaattaacarcttgcaaatgaggtgcaaataaaatgcagatgattgcgcggctttgaatccaattgacctgttcatttctcagtgttgggtgcttagctgagcagagagcagaagtctattcaggctggatctctggatcccccagccctcctccctgtctccagaacttgagcgtgatgttcacgggtggaggtgtctgcagagctgccagctggaaggaaggtggcacgggaactcccaggacgccacgggaatccccgaggcagcgcgagcccggagagagtggggaaggatgaactctctaacacctccccgccccttgcctcccagatcaggccaggtcctctccccgcatggccctacgacccgagttccctcccgagtcagcaagtacaagctggatgggtcctgagccggtggggaatagagaaaggccctgcaaggtacccaggcccacaaacaaaagcaatgggttctgcccacgggcccgaggattcagtagaaggaaagtggggacgctgtcccccgccccaaaggcactgacactgggcgacacacgctgagcctctcacgccgacgggcctctcacgccggagccggcaagaaaggtcggcgccagcccgcgggctctcaggaggctcggcagcgcgacgcgcatgctcagtcgggcagctctccgggccggcgtgggagcccgcgctccaaagcccggtggggggaggggcgctcacgcaaccgccactgtctggagcgggctcgcctctgcggcggcactcaccgcccgggctttactgaagcggagtctagcatgtgcggctgctccacagcggtgtgggtggcggcggctcctctgcagcagcctcggcagtaggggtcacggtggccaagcccaccgtggagctcatctgagagttgtaaggtacgggactgcctcggtctttgggacgccccgtctggtagcatcccagatccagcacgttccttccggccctgcaccccggcccggtgcctcacaccccgctaccccatgcatccagactctaaggcagcccctgcatctcagtcctgacatcgctgtccctggagcatcctccgctggagctggagcttgacaggtagggtggagagggccgtggggggggtgcggaaactgcatcaattaacggggccgtgggggagggaagtcctccattgctaaggcttcagtaggcgttctatgatcacagtgtaaacaaagctgcagggaagctctaactgggcggaacccaccgcagctcagcaaggcctactgcctctccagattccacctcaggggccagggcatatctgagcaaaaggcagcagacagcttctgcagacttcagtgtccttgcctgacatctctaaagacagcagtggttctcccagcacggagttcgtgctccgataacggacagactgcctccccragtgggtccctgacccccatgtagcttgactgaaaaacaccgcccagtaggggcggagagacacctcatacaggtgggtgcccctgtggaacaaagcttccagaagaaggatcaggcagcaatatttgctgttctgcagcctcctctactgatacccaagaaaataaggtctggaatggacttccagcaaacccccaaagacctgcagctgaggggcctgttagaaggaaaactaacaaacagaaaggaatagcatcaacatcagcaaaggacagcatcaacatcagaacaggaaaggacatccacactaaaaccccatccataggtcaccaacatcaaagaccaaaggtagataaaaccacaaagatggagagaaaccagagcaaaaaggctgaaacttccagaaatcagaacgtctcttctcttccaaaggaatacaagtcctcaccagcaagggaacaaaactggatggagaataagtttgatgacttgacagacgtaagcttcagaaggtcagtaataacaaactacacccagctaaaggagcatgttctaacccattgcaaggaagctaaaaaccttgacaaaaggttaaacgaatggctaactagaatgaagaatctagagaagagcttaaatgacctgatggagctgataaccacagtacaagaacttcatgaaggatacacaagcttcaatagctgattcaatcaagtggaagaaaggatatcagtgattgaatataaaattaatgaaataaagtgagaacacaagattagagacaagaaaagaaaaaagaaacattcaaattcaggaaatacagagaacatcacaaagacactccttgagaagagcaaccccaagacacataattgtcagattcagcaaggttaagggcagccagagagaaaggttgggttaccaacaaagggaagcccatcagactaacagcagatctctcagcagaaaccatacaaaccagaagagagtcgggaccaatattcaacattctgaaagaaaagatttttggaactagaatttcatatccagccaaactaagcttcgtaagtgaaggagaaataaaatcctttacagacaagcagatgctgagagagtttgtcaccaccaggcctgccttacaataagagctcctgaaggaagcactaaacatggaaaggaayaaccagtaccagccactgcaaaaacatacgaaattgtaaagaccattgatgctatgaagaaactgcatcaattaatgggcaaaataaccagctaacgtcatgacaggatcaaattcacatataacaatactaaccttcaatgtaaatgggataaatgccccaattaaaagacactgactggcaaattggataaagaatcaagacccatatggtgtgctgtattcaggagacccaatctcacgtgcaaagacacacataggctcaaaatgaaggtgtgtctggaattggtgggttcttggtctcactgacttcaagaatgaagccacggaccctcgcagtgagtgttacagtccttaaaggcagcgtgtccggagtttgttccttctgatgttcagacacgttcagagttttttccttctggtgggttcgtggtctcgctggcttcaggagtgaagctgcggaccttcacagtgagtgttacagctcttaaggcggcatgtctggagttgttcgttcctcccatccggagttgttcattcctcccactgggttcgtggcctcactggcctcaggagtgaagctgcagaccttcacgatgagtgttacagctcataaaggccgtgtggacccaaagagtgaggggcagcaagatttattgcaaagagcgaaagaacaaagcttccacagtgtggaaggggacccaagcaggttgctactgtttgaaggggtggcttgcccctccacacctgtgggtatttctagtcaggtgggacgagagactgagaaagagaaataagacacagagacaaagtatagagaaacaacagtgagcccaggggaccggcgctcagcataccaaggacttgcaccrgcaccggtctctgagttccctcagtttttattgattattatcgtcattatttcagtaaaaaggaatgtagtaggagggcagggtgataataaggagaaggtcagcaacaaacgtgagcaatagaatctaataattcagttcaagggaaggtactatgactggacatgcacgtaagccagatttatgtttctctccacccaaacatctcggtggagtaaagaataacgaggcagcattgctgcaaacatgtctcgcctcccaccatagggcggtttttctctcatctcagaactgaacaaatgtacaatcrggatytataccgagacttttagttcccaggagcaggcaggagacagtggccttcctctatctcaactgcaagaggccttccttttttactaacccaccgcagcacagaccctttatgggtgtcgggctgggggacagtcaggtctttctcatcccaggaggccatatttcagactatcacatggggagaaaccttggacaataccctgctttcaagggcagaggtccctgcggctttctgcagtgcactgtgcccctggtttattgagactagagaatggcgatgacttttaccaagtatactgcttgtaaacattttgttaacaaggcacgtcctacacagtcctagatcccttaaaccttgatttcatacaacacatgttcttgtgagctccaggttgggtcaaagtggttgggtcaaagtggctggggcaaagctaaaaattaacaacatctcagaaaagcaattatttaaagtacaggtctttttcaaaatgtagtctcttatgtcttccctttctacatagacacggtaacagtctgatctctctttcttttccctacatatcccccttttctttttgacaaaactgtcattgtcaccatggcctgtttttgctggtcactgtctttctggaactgctggatacacctgtagactaacaatagagagggcagacatacaaggattaatacaaaatttgcaatagtggaatttccaatggttttaacccaagtgatgggggcaagaggacagtgtgggtgctccggcacccaggcagtctcccttctcctttgtctcttagttgttgtttctcatagttttcaatctttctcctcacctgctcactcgcactttttgtttcattgtctcccttctcttatggtctctctctctttttctctttttcttccttttacactatttcttttcccagtctcactttctgtgtctctctctgatctctgtctttctcttttacattatttttttccccagtctcaccttctgtgtctttctctgatctctgtcttttccagtctctctcttactcattttctccctctctttctctctctctctctctctctctgtctgtcatcccgtgtcctctctccttcacactcagtctctttttctttttctttttctccctggctctccacatctgccgttttctctcctttctctttctgatttctcttctcactttctctcttcctttctttcccagtttctcttttttctctgttggtctttcccaaataatgaaaaggagtggaggtctgaatgttatcagatgctattgtcaggcctgcgtttgcaacctctgtctgcagaaatgtgtaacagtcaattaatttgtctctcgtttctgcagcactcaaaatatcatcaacataatgaataatataacagtctgaaaacttgtctctaactggttgaagaacttgagctacaaaagtctgacaaatagttggactattaagcattccctgaggcaacactttccgctgaaatctggtggctggttttttattatttatggctggtatagtaaaagcaaatttttttaaatcctattttgccagaggaatggtaaaaacgcaatcctttagctcaattataattaaaggccaatctttggggatcatggccggagaaagcagcccaagttggagagtccccatgggttgaattactgcattgwtggctctcaaatcagttaggatgcaccatctgcctgattttttctgaattacaaacgcaggagaatgccaaggtgaaaatgaaggctcaatgtttcccttttctaattgttcctttgccactaagtgtaaggcctccagtttttgctttggtagtggccactgatttacccatacaggcttttctgttttcccagttaatggaatgggttttggaggctctacagtggccactcctaaaaaggataccctatttcttttttttttttttttttggatttttttagcctcaattgggactttaatgccttctccatttttccctagtcctttaccagagagatatcccattttagtcatgattttttgactcgtggggctgtatagggagactggaatagtaatctctgcatgccactgttctaacaagtctcggccccataagttaattggaatagaaataatcataggctgaactgtactctcttgattattagggcctagacaatgtaaaatcatggcactttgatacacttctgaggc

SEQ ID NO: 94624 - DNA, 13219 bp, Homo sapiens
tagaaatgcttcggcctgtatgactttttaacctggtacacttaaaccttagctttaaggcaccttggggggtttctgaataggtgaatgcactatatctgaagttttaaagtcctagttaataaaaacctttttaaggaacttgttgtaaaatgagttatactttttcctttctttttaaaatactgtatgtactgtgtagtagaggcagggttgtgaacgaatgctggaccaagataaaagattacagttttagtcttggaataccactgtactagctaagtacttgagctgctcagctctcatgaactcagtattttaattggtcaggaaacaaaaataataatagtaactgccaaccacagagtgagactcaaatgaaataatatgatgaacgttctctgtggttttaaaaagctgcatggttatatacttagctgtagagtggttggaccagggggctgaatgacttggttgatcactgtacattaagtacagctgtccccgcttatccttggaagatttattccaaaacccccagtgtatgcctgaaactgaggacagtaccaaaccctgtatatagtatagtatgttttcctccatacatacatacctgtgataaagtttaatttataatataaagtaggcacagtaagagattaataataataactaataacaaaatagaacagttataatatacaagcaccactactcttgtgcttggagtccatattaaataaaataaaagtcacttgaacacaaacactgtgatacctcgtcaattgatctgattaaccgagagctattaagtgatgaatgagcgggtagtgtagactgttggattcgctggaccaaaggatgattcacatccagggtgggatagggcaggatggcatgcagtttcatcatgctactcagaacaatgtgccctttacaacttatgaattgtttattcctggaattttccttttaatatttttggaccatagttgaccatgggtaactgaaaccatggataagggggtctactgtatctcactctcatctcccgtgagaacagagccatgccctactttgatgctgttgctgactttttcacttggagtctgtggttgagcccctgctatctgaactactattgcatggcctgctccatcccccatacaccgtttctgcttttactctctatccactcttgtggccagcagtttccagtctcattacaaaagcagtttttgttctcttctgtttcttttctgttgcttttcctatgtttctagtcattgtacacgaaggcttattttgaataggcattctggccaacctgagtacttctttccttctgcggagtaaaccgaccaattacagtgcatctggtataaatagtctttggtactttggttctgcttggcagagcatattgttactgggtactcatggtctctctcttcattgacgaccctttttctttttggaatacgctcatattcagagtagttctggcagtgtggcgattaggaaagctgtttgtcagatgagctgcagttttcctgcaccgacgtgtttgtgtcaatcagttttgtatatcaagaatttgcagtgagttttgtttaacacaggtgcagggtggcaacgtgtaataaattagcctggtggtacattttgggtaacaattataaaaaatgtctttcagagtttttcaaacaacaaggaggcaaagagtaaagatcacagaattttggaatcagaggtccagtgatctaatcccagaactattatagccagccctccacatacctgggttctgcatccatggattcaaccaaccatggaatgacaatatttgaaaaacaaagattgtgtctgtactgaacatgtacagattttttattgtcataattttctaaatataggatgactatatttatatagtacttgtattaggtattgtaatctagaaatgatttaaagtatatgggaggatgtgcataggttatatgaaaatgtgatgccattttatataaggtccttgagcattgtggattttggtatctgagagaggtcctagaaccaagctccccactgataccaaggggtgactgtacgtgctaatggtgttattttgattgtgttacttaaactcctttatcctctgttctctcttatatagaataagaatagcaatacctacttaatagagttgttgggagaatttaatgagataagttatgtaaagtacttggaaccatactagtgtctaggatacttactaaatatttcttttaaattattcattaatggtattgttgaatagtttaaaaatcactatgtaataacatctgaaactattatagggcatttaaagatttttcataaaagccaatatccaaaatttaaacttacttttgataataacttagtattttaggtagatttagggtaactgaaaagatttcagtgaactataataattaggtaatgattttgtaattgaaattttatcctgaattttaagtttggagaagtgatgttgagattttaccattatacacacacacaggcacccatacaagcatgcatgtacatatatgcaaattttgccaataaagtatttgcagtgtatagttaatgaaatgtacatatgaaaaacattgttagatgacttccaaattctttaccatgattgactttatgcttttaaattagatgatatagtatctaggagtatgtattagtccattttcatggtgctatacagaaatacctgaaactgagtatcttataaagaaaaagaggtttaatggactcacagttcaacatggctggggaggcctcacaatcatggcagaaggtgaaggaggagcaaaggcacggcttacatggaggcaggcaagagagtatgtgcaggggagctaccctttataaaaccatcagatctcgtgagactttttcactatcatgagaacagcatgggaaaaacctgcccccatgattcaattacttcccaccaggtatctcccatgataagtggggattatgggagctacaattcaagatgaaatttgggtggggacacagtcataccatatgagagtatatgcaaagttatgattttttaccgtattgtaagaatgattctattctacagtatatatcttaggtaatgacatatcttaaaaaatgaaaatacagacttagtttacagacttggtttgtattggaaaagattgtgttaaattgatagcccgaatctcaggaatacttttatgtactgtttgttttacagtaagcagcactgaatataaaagctctgtttgaatccttttctgggaagcttgttctcactcattccttcatactctcaccaggacctacaacttgtattactttatttataagtaattgtgcacttatgaatattaatcttggccgggcactgtggctcaagcctgtaatcccagcactttgggaggccgaggcgggcggatcacctgaggttgggagtttgagaccagcctgaccaacatggagaaaccccgtctttactaaaaaaaaaaaaaaaaaaaaaaatttctgggtgtggaggtgcaagcctgtaaccccagctactcggaaggctgaggcaggagaatcccttgaacctgggaggcagaggttgcagtgagccgacatcgtgccattgtgctctaccctgggcaacgagcaaaactccgtctcaaaaaaaaaaaaaagaaaaaaagaatattaatctctctcctaattaaaacatcttttacatatttaacatttttctagggattccctgtataaagaaaatatgtattaacttaaaatgttaacaattttttctttcctcttcacccccatttccttgaaagagaaagatttttaactccccaaaaaaacctaaacatgctgaaggtgatctactaccggaggcaataaggctttctctttaaagtcaatgtgtttctgatttcccctgcccccaccccagtcccttctagattaaaacaggtcacagttttataacgatggggttggttatatttgcttaagaaatatagttgaaattggccattttggagtaattaataacgtttggagtaaaacattagtgatattgccacacttacagtggaaaatgagcaagttaatacaataaaccatatcaaccaaagatattttacctcagccactatcattattcatttcttgtatgttaccttattctcacttggaatgtttactctgttcctactgataactaaagtctaacagcaagtggaaagctcctaaaaagaacacttttggttcttgttggatagcagcctagttttctctaatccacatctgttctttggcatatttttagactgttcaggtgaaaatttaccccgtatcttaataaaacaaattctgttactgatgggttaaaaaaaatcggtcatactatttttaagttgttaatgggaaaacaagtcaattttgcaggatggctctcaagtctatggaattaatttacattggtgcaagaaaccaactgttcaagactttattaaacatgctttcaccagatgacttttagaactaaacagaagaagccaggtgtggtggctcacacatgtaatctcatcacttcaagaggctaagagggcaggattgcttaagcccagcagtttgagactggcctgggcaacatagcgagattccatctctacaaaaaataaaatagctgaggcaggaggatcacttgaacctaggagttcaagactagcctgggcaacacagggagaccctgtctctataaaaaataaaaattagttgggcagggtggtgcacacctgtggtaccagatactcaggaggctgagattggaggatcacttgggcctgggggatcgaggctgcagtgagctgtgattgtgccactgcacttcagcctgggtgacagagtgagattctgtctcaaaataaataaataaataaaataaaataaataataattagctgggcttggtggcaggtgcctgtagtcctggctactttggaggctgagtgggaggatcacttgatcccaggagtttgaggttacagtgatagtgagcaatgatcataccactgcactccagtctgggccaacagagtgaggtcctgtctccagaaaagaaaagaactaacaaaagactagtaattgggtttttccactttggagttggatgggaaggtgtagttatctattatgaggggagaagtttaagtatgacctccctataaattaactttggtgatattgagagaagtggacttggagaggattttgcctcttccttgctgatgatacagtgctttccttttatgatatagaggagggatgattctagggaaaattggataaactttttctttgtggggagaaaaaagatgcactgtaatggaagatagatagtttctttcttttttttttttttttttgagacagagtctcactgtgtcgcccaggctggagtgcagtggcacgatctcggctcactgcaagctccacctcccgggttcacgccattctcctgcctcagcctcccgagtagctgggactacaggcgtccgccaccgtgcctagctaattttttctattttttggtagagacggggtttcaccatggtctcgatctcctgacctcgtgatccgccctcctcggtcccccaaagtgctgggattacaggcgtgagccaccgtgcccggccaaagatagatagtttcaatgagtatctttgtgaattggaaccagagcatcaaataagcttttgaggtgacatcaagacatgttagaatggaagttctccagattcaactgtctatagaagtagctctgtggtatttagcctctaggatatattttgattatgtgctgaatttttggcatgtgttataaaacagtggcttgtttgtattttttaaaatgctataatcatagtaaatacctttatgcttatctttatgtacttagaatttgagttctgataatttatttttytatgggaggtggggaggtttattttttaaattgcagtccaaaggagtaaatttgatgttacattggacagtttattcagataccacaaactttacagatttaattagatagataatggatgatgttaaaaactaagcagcatcttaagtttaaatttttatttttatttctttttctgtcatcattatttatgaaaactggttgaaaatgaagttaaaagattttctgtacatcataagattggacagaaatattatttaccttaaaactttttctgagtaaaaatttaaacataaactagaactcagcctgaatttttttttaaaccatctttggaagcacatataaaagtagagtaaatacatcgaatgtagcttacctactgcatttgaagaaaatcttttgtgtatgtctgtaagctatttgtgtgttttgaaacagtttaccagaatagactgaaactggtagaaacaggcataagtaactctgcagtggtagttgtattgaaaactggaatggtagtctctttcaaaatcttgaagagatggaaactaatgaatcttttttttttttggtaaaatagtatttttttttgttcacttaaatgaaattatttgtactttaagttttgttccaggaaattacttcagttgtagctaatttattggcaccctttactaacaaatttctgttctgtattaagattagtattagaaaaaaaaggagatgtatggaaattaagaaagcaacaaaaattataagaataattgcccttataaagaagtcattatatgaaaaagatacttgcacacgcatgtttatagcggcacaattcgcaatggcaaaaatgtggaaccaacccaaatacccatcaatcaacgagttaataaagaaactgtggcatatgtatacgatggaatattactcagccataaaaaggaatgaattaatggcattcgcagtgacctggatgagattggagactgttattctaagtgaagtaactcgggaatggaaaaccaaacatcctatgttctcactcataagtgggagctaaaccacgagtatgtaaaggcataagaatgacacaatggactttggggattcaaggggagagggtgggtagagggtgagggataaaagatgttgggtgcaatgtatactgctcaggtgatgagtacatcaaaatctcacacatcaccactaaagaacttactcgtaaccaaagaccatctgttccccaataacctatggagataaaaaaaattcaaaaaaagaaaattgtccttatatacatgtcagacaaaagatttaattatatttggtaagaacattgtagattgttttgtagtgtattctgagaacttatgtcagaggccagaaatggccattgttaccagaagtaatggaaggaaaggaaaagtaagggtatgcttaccattttaggtaatctgatttctgcatattgtagtgtaaaaatatgatagttctattcaaaattttggagaaacatttgaacttcgtttattttaaattaggaaatcagctcaaataggcattggcctttgatttaagagtgttaagtcattcttatgtagaaatgtgctatctcccgagaaagcatcagtgtgggatgccttcagctcatgccatcccctcttccattaggaagcatttgtaaatgcttagccgtgttagggatcatgttagatattgggggcagtgactctgaagagattgtgcgacataatctcaaagagcttagggtctggtagggagacaaccaagcaaacagctactctaaaatagagacatgcttatggcttgagtgagtacataagaggggcacctgacccagactgggagggaaggaggcacttgtgagatgcttatgcttgaactgactcctgaagaacaaataagaattagattaataaagatgagagagaaggctgggtgaggtggctcctgcctgtattcccagcaccctgggaggctgaggtgggtagatcacctgaggtcagcagctcaagaccagcccggccaacatggtgaaaccttctttctactaaaagtacgaaaattagctgggcttggtggtgcatgcctgtaatcctagccactagggaggctgaggcaggagaatcgcttgaacctgggaacctgggaggcggaggttgcagtgagccgagattgtgccactgcactccagcctggacaacagacaacaaagcaagagtccatctcaaaaaaaaaaaaaaaaaaggatgagagagaggaatatttcaggagaaatatgtagggagagaaaagcttggtgtccaagaaaagggaataaagctggaggataggatggagggagggagagaagagagatgagttgataggagccagatcaccaagggcctggggttctctgataacatttaaacaattgtctgaagtgggataaaatccaacacagaaaaacaggtagctattataggattatattggctatataggattatataggctgtataggattatattggaggatttgtattgccagtggtgattagtattttaaaaagttaagaacaaagatgaaaataaatttggatatagtagaaatggaaaggtggagaaaacttgactttacttggtaagtagctgaatgtggagggttaaggggaaagagaggtttaagactattctcagatttctgttggacaagtgagtaaaaaagaaacacatatgtagatcacttttgggtgaagggagatggaaagacgtgcctactttccttaatgagtaagaggaggagaggtgagatgtcagaacatctctgctcacaaatgtgtgttgtgtggatgcttcagagtttggcacgcctgtatttgctactttcaattggtgctaaaacttcgtcattgcacctttatttttgctggcatattatttcttttgataataaagacttttggttataagtgattgtctcaatatgtttgagctgctgtaacaaaatactataaactaggcagcttataaacaacaggaattgatttctcacagttttgaaagctgggaggtccaagatcaaggtgctagcagatatggtgcctgtagaggccccacttccttgttcaaagtggctttctttttgctgtgtccttacatggaggtcgggggcaagggaattctctggggcctgttttcaaaaggcatgaatccctataatgaggatttcattcagatgacctaatcacctcccagatgcctcacctccaaataccattacactgggcattaggatttaacataggaattttcaaggacacacacattgtgttcttgtcattagcagtgacatgagcacaattcaggaaaggtggagcctcttgcttgtctgaaccaaagagctctaatgaggccatgaggactctgtttctttcttcatctcttggtccggctatggtgatcttcatgaccattggcaacctagagttttctccctaattctctctgaagtgctctgtggaggactttaggtatcctgacttggggaatggtagggatactttgtctaggccaaggccttgttcctgcacttacagtctggcatatgagtggaaaggaggcaggtttgtctgtgtgacactatatggaataggttcaccaacaggaaacacactctgttaggaggaagggcaaggtattcttggaaggtgggaggatcacagaggtcggtgaaacctatgaagtcctcttctgttctactctcatgacccttggcaataagtagtattcttggtttcaactccatcataaatgcaatatttgaaatcatgtaggcccacagaattatgaggtggtcacctataggagatagttgattcatatagatatgcgtgcacaagcatgtgtttgtgttggattattatctgtctcgagggtgagcatcttgtggggcaaacccaccctgcagtctgtttttttaaaccagccacgcccattcatttatgtgttgtctgtgtctgctttctctctacaatgtcagggtttagtagttgtgacagagaccttggggcttgcaaagcctaaaatatttactatctggcccttaaccgaaaaagtttgccaacccctgatctaaatggaaacacataattttaaaactcttctggcaaacttactgatccctgagagcacatctggacattctcaggggttctccgaccacagttgagaaacacaggtctacgatgtaattgttaggagtgaaagctcaaggtcagacttagagatgtaaaattttacagacttccctttccctgagaccacactacagtgagcactatctgtgacttttgcagaacttggcaagcatgctgcctaggagactatactagcagtaagtgactagatggcatggaccccatgctactataatcgttacaggttttgtcccaactaatcctatctgagtgtgctggcgagcagcgattttcatgcaactgtaagtctttgtgtgctggtcccatcagcccctgtcacgtggtcctggcagtcctgtttggcctgcaggaagtgcctgctgtttcatctcagaatggctgcttctacgatgctcgagttgctgtttgttaacttgggccccctctgcctccttagctgcaagcctgtgtttccaagcagttgtttcccagctgtctgttgctttgttacattgtttcaggctgtgcttcaatgtgctctccaagtgttttgcttgacctccccatgggtatctgccttgctttagctcagtgctaagcagcagtttggtattcttctggtatccatttttctcatgtggtcagcctactggtcctgattttctgtgattgaggttttgacacttgcaaagtgactctgcatcattgcttggttgttgacagactcgtcttcatgcttttttgttctttgggctacccaggagtcacctttgataaaatgtcagtaacatactgctgtgataggattttttttttttttcttattggcaagaaaaagccatgtttttgccgtgatctggattgctatcttctgtactttttgagactccccatttgtcaaatggttgcagtttgaatgtggttgtcctcaggtaggaaagtcagtgtcaggacccaggattgcctactgcagagttatatctgattcttatgtttttcaggaatgttgttaatttatgtggctagaaatgtgaattttacaaaatagtaacaattggcttttcaaaatctgtagctgaaatgttggtttgtagatttaaaataatacatgggttaattgagtggaaaatgctgccttggatatgatttttaatagtgaatttgaaaaatgactaattttatatgcatgtgaaatgaaattgtaagtcctgacaagtaaatggaatatgttttagccaacagctacctgtacttaaaaacaaaaccccaaaaacctgctcatttgattttcagtaagagtctattaaaaattcttaaatcagaaaccaggtagtaaacaatttctgtaaaagccgattttcaagtggagacattttgacctggagctagtgaattcaatgaaaaaaacaaaaaacaaaaaacaaaaaaagctaagagagacacattatatccaatgtatgttataatacttatttaaagggtatcataatattttgagtttggggaaagttcaatcctaatgttaatgtttatgaggaaatgtgtaatattcatgcatttctatgcaattctctacttgccacaagccaaagaagaaacaatcaatttacaaataacacagaggcagtaaatttgttggtggtgatgctagctaggcctattgtaattccataattctgtagttttttttcaacctgcaagtggtgaattgctaatgttgctgggagccaaagatatggtgatatgtgaaagtgtccaggcagcgcttacattatgtaaggcttggaggtattttgatgtcagtaaaatactttatgggagtaataggaaaatgtgtactgttgaaatcatatccagaaaattcagagtttatgttgaattttatttcccaactcacatttgaggtttacaagttttgcttagtgtgcttggtgctactcgatcaattgagacacagttcctctctggtgggggttcatgtctgtgtccagacatcttgttggctgtgctctaatcacagtgatcattttgagctgttgttaagaaaaacatggcttccaacatagatgccttgttttctccaacaaatatttaagctatattgccacctccattttagttgtttctctttagatctggctgtcataatttatctgttttgcttcatccaagatgattgctgtaaacaggcatagggtgctgtcttcccttctaggcagcccagtaattccatctcagataatttctagttacctgttggatacttacgtgaaggtctgaataaattatgatcattacgaacatgatacatgagtaatgaattaaaagaaatatttaaaagttttatattttaagtctccagggagtaaggcattgagaaaatggggtaaatatttcttgtcgaagagaaatcaaatatgggtgaatcattgactactgggagtccttgggtttattctcagatctttcactttttggcagtattctggaagcaagttagtgacttgactgaagctcagtttgcacatctgtgaagaggacagtaatttctggtctcatagggctgttaagagcatggaatggaatccaattcggcttcatctatctttatttttcatgtaatctgtcaggcaccatgttagtggaatgtcttgtaaataatgaatcgtatagcctctggtctcaaggatctcataaacctactggacagatattatgtattttggtttcctacatgacatccaagttcatgaatcttttgaattctttccatacaacccaggatgcaagcttctggtaagacaaatggatatttattaagatcctgtaagaaacaaggcagaaaattaaagtcattaggagtatagaaataaaagatttcttgggctttcacctctgtaaacttgaggagtttggctaagtcagtagttggaagcgtagtaaggtcagaagtcaccgtcaacttccgttaaatcccaaagcr

SEQ ID NO: 94625 - DNA, 47643 bp, Homo sapiens
  misc_feature (1)...(47643): n = A,T,C or G
acatattgaaacttactctaaggtttactattctgttgcccagcaagtcctcttataggtatgcagcctactgtccgtgttgtttatggattcataaatttacagtgaatgtataaaacacagacttagtggacaggcatcaaattgatcattatcaagagaagggaggggaatgggataaagaataacagtgaaattttaattttttaagcaatgtttcattaaaaaaatttatttaggccaggctcagtggctcacacctgtaatcctagcattttgggaggccaaggcaggtggattgcttgaggtcgggagtttgagaccagcctggccaacatggtaaaaccccatctctactaaaaatactaaagattagccaggcatagtggtacaatcttggctcactgcactcagtgtgggcgacagagcaagactctgtttcaaaaataaataaataaataataaaaaaaatatgtttgatgcaggaatgacaaatgtgaattctgggtagtggtttctttttttctttttttgttcttcagagcagaagaacttgaggcggtggtttcttttgttgaatattaattgttctgtgaatgtttctgtatgtttcagtcaaacaaaaagttgattaattttcaaagtaaaaacaaaaagtctttgtattcactacttgctgggattttgctttttattttttactttatttatttatttattttttgagatggagtctcactctcactctgtctcccaggctggagcgcagtggcatgatctctgcctcccaggtttaagcaattctcctgcctcagcctctggagtagctgggattacaggcgtgcaccaccatacccggctaattttttgtatttttagtagagacagggtttcaccatgctggccaggctggtctcgaactcctggcctcaggtgatccactcgcctcaccctgccaaagtggtgggattacaggcatgagccaccatgcccggcctattttttacttttttattttccaggacagagtcttgctctgccgcccaggctcgagtgcagtggcgcgatctcggctcactgcaacatctgcctcccaggttcaagagattctgctgcctcagcctcccgagcagctgagattacaggcttgcaccaccatgcccgcctaatttttgtatttttagcagggacggggttttacatgctggtctcaaactcctgaccttcagtgatctgcctgtcttggcctcccaaagtactgggattacaggcgtgagccactgcgtccggcccggattttgccttttaaataacactattcagttccagatgtttggaaagacataaggaatttgaactacttctgtaattttagatggtctcataaatattgtgaaactcagcattctaaacacggtttctgagctaaatcttgtttagttttcaccatgctttaaagattagttgtggccaggcacagtggctcacgcctgtaatcccagcattttgggagggtgagacgggtggatcacctgaggccaggagttcgagaccagcctggccaacatagtgaaatcccgtctctactaaaaatacaaaaattagccgggtatggtggcacaagcttgtaatcccagctactcgggaggctgaggcaggagaatcacttgaacccaggaggtggaggctgcaatgagctgagatcgtgccactgcactccaacctgggtgacagagtgagactccgtctcaaaaaaaaaaaaaaaagacagacaaaagattagttatgactaataaatacaagtacgaagtggcccttgggtcaagataagtctgttgtagacttttttttttccccttgagacatggtctcactctgtcacataggctggagtgcagtggcaggatcacaccacaacctatccgggctcaagccatcctcccagctctggctcccaagtagctaggactataggtgagtgccaccacgcctggctaatttttttttgcaatttatagagacagggtttcgccatgttgctcaggctggtctcaaactcttggcctcaatagatcctccagccttggcctcccacagtgctgggattacaggtgtgagccttgtttgcagagtttaggtcccaaagaatataaagacactcaaagtatctcaacctcttggaacacctcttgggcatcaagaacaacgctactagaaataagcagtttgcctctagagaaacttcaagtaagcacaacaaagggcaaagtgacacaagataactgtggaatgcaagcaaacagcagcagctggtctgtatttttttaaatggcaaagtcacaaacaacagcaactgcttttagagtgagcaggtagtttgctttcttttttttcaaatggaactcactttttaagtgatgacatgcacttgggggtgggtaggtgtgagttcatttgtgttttgaaatcccaaattaatgagcatgataaaccgctattgctggccctgtctgactctctactctgagtaattggtgggttccccccaaccttctcctaaccctcaccctttttccctttccattgacttgggacagtccttgtcaaagtgccaatcacagtgggaaggaggagaaggggggaggtcacagtgcatgggattyaaggtcacagtgggcggagcaacggggatcaccaggcaagtaagtcaagttcccgctgctcaagtccagctgtctgccacggtagtgcaacccttggcggacgacccaggacgcgttgacgcggcagtcgcgccatctcttcttgcctgcatttatctgcgctgtttgaagccgtgtgacccatcaggacccagaggctgtctgatcacattattgggctgtctgctgtcttcgggttaggagatcctggttggcctgaagggaagaagatcagaggaagacctatcgaggatgggtttctcctgcttctcctcgggttggcgctgcccaggatccgcttcctggcctcggtgtactcggcttcccactgtgccagggacttgactggaagggcgggcctgctagcggacttggggctgctgaccacaccgttgctggtgggcctcttgaggatgcggacctgtggagggggtcccgggggaaaattatcatcctgaatcacaatgggcactttgggagatttgaatttcctgctttctgtgtgatcttcagttttttttccagacgtctatttccccgctgtctgccgtctcctcccagctctcagcaacctcctcatattccatcttactcgccactttccagatcgcttgctttcttatttccacattttctctgacttttgcagtattcaatattattacctgattctgatttttcagacatcactatatggtccttggctttttggtcgttcctctcattcctttgctgtttcaagctctgttcccagcctaagctttttaccaccgaattctgttctgtgacccataacttaaaactaacccaacttttcattccctccagactttttttggtaagcagtatcatcatgctttaggtggacactgagtcatactgctgtggtagtgctggtacacgtagttttgaataccaggttcttgagtgaatcctttttacttctctctctctcccccacccccgcttctcccttctgccttcatttctgacccttcttttctggttccattagaaaaggactaatcttatcagttctgcctttttttttctgctctaataattttgtcaagataattttttcaaagcacaaggccaatgagaagggggaaagtcggtccagaaggcagccggcccgactattctgagtttgaatctactcttggtggtcctgttaaaatacagtttgaagcaaatcacttgtttttatgcttctaatgtctactctgtcgaaagcccaaatttccttgcttggcatttaaggagactccaagttcttaaaacttcttcttgactttcatgcaagtcaaacggatttatttattgtatctcaaacagtcctcttatattttcctttctgtattttttgataattttcttgtgcctggaatattctctgcttttatttaagtctcaccatctttcaagacacaaaatatgtgtgatctctgaggcctttgtgaactgcctccagcatttactaagcaattaattctgtctctgaacttttatagcacaaacccattcgttcacttgatatttaacaaatatcaacctctatcacttatctcttttttttttttttttcttctgagatggagtcttgctctgtcacccaggctggactgcagtggcgcgatctccgctcactgcaacctctgcctcccgagatcaagcgattcttctgcctcagcctcccaagtggctaggattacaggcgcccgccacggggcccggctaatttttgtatttttagtagagacaaggtttcaccatcttggccaggctggtctcgaactcctaacctcgtgatccacccacctcagcctcccaaagtgctgggattacaagcgtgagccaccgtgcgcagcctatcacttatcttttcatgcttacattttctcactgcttgagattttctttcatccagggtcaagcactgagtctattagaaaccccactgtatatgatctgatgaagatgagattatctttttaaaagccacatattaaatctcttaagttaataatattggcaatcaacttaaatcaactgagtgaccactatgtttaaggaagtttcctttctggtaggctgggaagcgggagaagggaaggatataactttataaaaaaaaaaaagctgcagaagggaaggatataactttataaaaaaaggtccttgttcacaaggagctaatcacttactggccagagaagaaacgtgttccttctttgcaatggctgtgtttttgggtttagctaactcaattctttatgtcctcaatttatgagaccgcatcaaaaacgtttttgccacatctctgtgggaaagtaggtgagtcagaatgagtgcataatatataagtatatattttaatgataatgaatgtgtagattaacaaacccaaactttgtttttgtttttttgagagtcttgccctgtcgcccaggctggagtgcaatggcatgatcttggctcactgcagcctctgcctcccgggttcacaggattgtcctgcctcagcctccggagtagagtagctgggattacaggtgaccgccaccacgcccgactaatttttgtagtttttagtagagacggcgtttcccatgttggccaggttggtcttgaactcctgacctcaagtgatccacccgcctcggcctacccaaagtgatgggattacaagcgtgagccaccgcgcccagccaaacccaaacattctaaaagcgcagagtaaccgctcccctccccgccaacggtaaccagcatcttcgttctccaaccagaacagctgtatgcaccggtgtataagcctgccttaagtgctatttttaatcttttttaaaaacaggccttaaaataactcatttgggtacaactccagcggctggtggagtgggcttaatatattaaacagctgttaattttggtttctttttggtaacagcgacacggagatccgcatttgtcgcagtttccaccgcgggcgggaagtgtaaacacaagaaatacaaacatagcgcaacggctaaaggagtgtcacagcgccaaaccttgctggctccgcgccaggccgagccccaccctctcagctcgcggccaacacccccaccccgcctcacagcccgccgcgcccgcggggcgacaccccccactccatcatcccggaggtggtgcggccgagccccggacccaattggcggaagcggggccggttgtgtgcgcgcgcacaaatgcccggatgcgccgcgacgacccgcgcgctcccctcgggcggtagggggcgcgcaccgaggcaccgcggcgagcttggctgcttctggggcctgtgtggccctgtgtgtcggaaagatggagcaagaagccgagcccgaggggcggccgcgacccctctgaccgagatcctgctgctttcgcagccaggagcaccgtccctccccggattagtgcgtacgagcgcccagtgccctggcccggagagtggaatgrtccccgaggcccagggcgtcgtgcttccgcgcgccccgtgaaggaaactggggagtcttgagggacccccgactccaagcgcgaaaaccccggatggtgaggagcaggtactggcccggcagcgagcggtcacttttgggtctgggctctgacggtgtcccytctatcgctggttcccagcctctgcccgttcgcagcctttgtgcggttcgtggctgggggctcggggcgcggggcgcggggcatggggcacgtggctttgcggaggttttgttggactggggctaggcagtcgccgccagggaggagggcgggatttcggacggctctcgcggcggtgggggtgggggtggttcggaggtctccgcgggagttcagggtaaaggtcacgggggccgggggctgcggggccgctkcggcgcgggaggtccggatgatcgcaggtgcctgwcgggtcactagtgtgaacgctgcgcgtagtctgggcgggattgggccggttcagtgggcaggttgactcagcttttcctcttgagctggtcaagttcagacacgttccgaaactgcagtaaaaggagttaagtcctgacttgtctccagctggggctatttaaaccatgcattttcccagctgtgttcagtggcgattggagggtagacctgtgggcacggacgcacgccactttttctctgctgatccaggtaagcaccgacttgcttgtagctttagttttaactgttgtttatgttctttatatatgatgtattttccacagatgtttcatgatttccagttttcatcgtgtcttttttttccttgtaggcaaatgtgcaataccaacatgtctgtacctactgatggtgctgtaaccacctcacagattccagcttcggaacaagagaccctggttagtatttttgtctcgtgtaacttttaagaataatttattttatgaagtgataaactaaatttcgtatacctcaattgtagcatggctctgtaaataaaattgtatgtgcatagcttaaagtgtgctacctctggcgtaactgcgtggagttaaaaactgttaagaactggtcagtatttttttagccatttgccacatttgctttaaaaattagttccattacattgttaagcgtgrttgaagttacgtttgttacgtgactgatttttttttcctttttgacctcccagtatttaatttttaaaaatggtttctaaaagtcaaaaaarttattcgtgcttgttttaaagatttttgtcattagagaaattttaaagtaaaacctgaaaattccaggctttttgctccatgtttccttttagattttttgtgtgcgtacccacatatawttacatttgaatttaaatctatgttattgtcctgtttgttgtactaacaagatgaaactgtagttgttctgtgacttgcatccttgtcaataaataaagtctacagaattctttttaatggctgcatagtattccacagcatgagtataccattttaaaaattatttatgcctttactgataggtttttaaaaattgcctcctgtttttgagtattacagatagtgccgctttgtacatgcatcccgtgtgactatttctgtaagaaagattttatagaattataggctggcctcggtggctcacccctgtaatcccatcactttgggaggccaaggcggaccgatcacctgagatgaggagttcaagactagcctggccaacatggtgaaaacctgtctctactaaaaatacaaaaattagtcgggcatggtggcgcgcgcctataatcccctgctgaggaggctggggcaggagaatcgcttgaacccaggaggcagaggttgcggtgagccaagattgcgccatttcactccagcctgggcgataagagcgaaactccgtctaaaaaaaaaaaaaagaaaagaaaaagattttagagaattagaactcctgagttctcaattttactatttgattgctactggtaacttgctcaccaaaaggctctaacagtttcactcctgccaatactgaatatcaccaatctttaattattattattattwttttttttgaggcggagtcttgctctgtctcccaggctggagtgcagtggcacaatctcggctcactgcaatctccgttccccgggttcacgccattcccctgcctcagcctcccgagtagctgggactacaggcgcccaccaccacgcccggctaattttttgtatttttagtagagacggggtttcaccatgttagccaggatgatcttgatcccctgacctggtgatccgcccgcctcggcctcccaaagtgctgggattacaggcgtgagtcactgcgcctggcctcttttattattattactatttttttgataaaaggtactgtaccattgtttaaattcatttttctctagtttcttggtgaggctgggcacctttcctttttgtttttgtttttgttttttttgagacagagtttcactcctgttgcccaggctggagtgcaatggcgagatcttgtctcattgcaacctctgcctcacgggttcaagcgattctcttgcctcagcctctggagtagctgggattacaggcatgcgccaccacgctcagctaattttgtatttttagtagagatggggtttttccatgttggtcaggctggtcttgaactcccaacttcaggtgatctgcctgcctcggcctcccaaagtgctgggattacaggcgtgaatcactgcaccaggcctccattttgttaagtcatttatttcttctgggacttgcctagtcttatctgtccattttccttttagttttttaaaatttttcttagtaattggagtagctctatgtgtttcaagtatatttaacttttgttgtttactaatgtagcatttaattttatgttgtcttttccccattgagaacaattctgtgaagtaaaatttgttggcttttgaatttcatatcatgctttggaagaactctcctgtcccaagatcttgcaaatatattcctatattttcttctagatttaaattttttaaatatttagatcttcacctgtaatttaccttcttgttcttcaatgtaagattacaaatgctattatcttttatagcygttttctcattaatacatgtcttttaagtcactaatatactgatggctttccattacagatttttttttttttttttttttgagactgagtcttggtctgttgcccaggctggagtgcagtggcatgatctcggctcactgcaacctctgcttcctgggttcaagcaattctgccgcagcctcccgagtagctgggattacaggcacccacctccacacccggataatttttgtacttttagtagagatagggtttcaccatgttgtccaggctggtcttgaacttctgacctcctgatctgcctgtcttggcctcccaaagtgctgggattaaaggcrtgagccactgcgcctggcccacacctgggtaatttttgtatatttaatagagacggagtttcactgtgttggccaggctggtctcacactyctgacctcaggtgatctgcctgcctcggcctcccaaagtgctgggattacagacctgagccactgcacctggcttccattacagatttttactttgaattattttatctaatttgaagctaatatagcatataataaaaattcaggagaaaaaaggttatttttaaatcttttttgagagagtccattctttagcctgaaartaaagtgcatatgtaagcacagttaaaaaaaaaaaaagtgatcagaaaaattaataattcaattctatatgtattttaaatttttcaattgttaaataatatttgttttattgattagctggaaataggcaatttttaaaaatctgtttttaaggcatccccaatgggggtgctgtcagattttaaagttagacagaggaccggggcatattaaagagaggtgcagaggtaccagtttgtgtggtagtggcaagctgtaaagatacttgagttttgcagattttgataaaccaaaaggaagggagaaagtgcatagtatattacattcccctcccccatgacaattatttttctcaagaccatttgtaaaacctctagataaggggcaggcaaatgttagcctgtcagccaactttggcctgttacctgtttttgttttagtttttaaattttttttgtagaggtggagtctctcagtgtggcccaggctggtcttgaacacctagcctcaagcaaacctctagcrctgtctcccaaagtgctggggttataggcaagagccacctctcccagccagctgcctttctttctgtaaggaaaattttactggaatgcaaccatgcccgttggtttacatagtagccatgctttttacttggatagaaccatttgtatgaaaagcttaaaatacttacagtctggctctttacagaaaaaaattgacccctaatctagttggcaggctccttgcatacaggtcatatgtcttatttgtaatttcttttgcagtacctaccactgtccagtgcatagtagaagctcaataaatgtttgtcaagtagatatttgaaatgtagactaactaagaggcagcatgatatagtaggaagaaaatgctgagttgtagttgagggacctgggttgttatctctgatctgttcttaattacccttgtcagcttgggttagttagttaggttctctagccttcaggaacctaatctttagaaagagaagattgataacaggacccactctaaagatttattcatttctctttgattctctaagttagcttgcaataagctcgttggatcagtacggtaagctcattggatctcagtaatttatggttgtttgtaaggcagtaagcaggtaatataaatagctgaaggaaaaagtaatctttgctcttttggattggatactrtctgtgatcacaactgatacttgatgattccrtgatacttgcataatgattagatcctccccagcattttttccaaatcccctttattgaacttgatggatatgtttgctgcagggcctatagttctgggataattttggaagtataatagcagttcttttmtctttataggttagaccaaagccattgcttttgaagttattaaagtctgttggtgcacaaaaagacacttatactatgaaagaggtaagctgaatcaagagataagtagtatctcactagttacatgtagccatacttaaagttttcaagaccatgtggagaaattggccatatagaaggatttttcattaagcagcaacatttaattttgtggtcgtttggactatattttaaagctgaaaattctaattatactcgagtttcatttctcagctaggaactcagataaatggaagccccgtaagggtgcttgaccattttatgctgtcaaccctttggtagactccttcccagaatcatgtttttaaatgtatgaaataaaatgtatagaattacaaaggaaacatactaaaatacggttaccaaaatagtaaactagtttgtgatatgtgtgcttttgttattaacataataaatactaagatttagaagaagatataataaatataatgtttttttgttttttgagacgaagtctcgctctgtcacccaagctggagtgcagtggcacgatctcrgctcactgcaacctccgcctcctagattcaagcccttcttctgccttacccttccaagtagctgggattataggcacctgccaccacgcctggctaattttttgtctttttagtagagatggggtttctccatgttggccaggctggtcttgaactcctagtctcaggtgatccacttgccttggcctcccaaaatgctgggattataggcatgagccaccatgcctggccaataaatattatcttgatatagtgaggaatataagtcatattttgaaatgtttgccataagtacagtatgataggaaaacacctctgatttttgttggtgatgaaatcacaggtattaatactgttgtgatttgttgcctacatttataatcgaaggaaaagctaaattctagttagaagtttgtgaaaataagaatagaattttttttttcccatccaaattaatggaccccctgaattctatccaaggacttcttgggcatccctggatcccaggttaagaacttctgcactagagatacatgagtacagtatactgatctttctgggatagaggtgagctgattcatgaccatatattctatctaatggttccagcattttaatgcattccccacctttaaatttgtgcacagaagcatgattttcagtgacagattgagcmaccttaggcagaatttcagtgtgattgaaatatgcctgttctctgtctctcccacttagtttatgggactcagattacttaaaacatttaagtttctttcttacaacggtatagtggggcaggaagagcttccatttttctttttcctctccagctatacttttagaaacttccttaaaggatgtttggtagaataaatctaagttctcttcctttttcctttcccactgctggacagcaatctgtccaatccacagtcacataagaatattcctttaaggccgatgcctgcttagccagttaaatccaaagacagtgttygtaggaaagggccaggttaaatggtatttttaaggctaatttgggattgaccttattatcattggataatcagttaaggaaacaaaaaagtatggatttagcagtagatagaaatgagaaaattggccaaggccatcataaagacttagaatgcttatgctaaactatgtaacagtagtgtatgtattgtctgatatagttctcagttataggatctttgttctggggcacacaggaaggtagtgaaagctagtatgggtagtaaaaagagcgttggattaagagtcagaagagctggggccagtttcttcttcttttttttttttttttttttttttatgtgacagtttctcactctcttgcccaggctggagtgcagtggcatgatcactgctcgctgcagcctggacctcgtgggctcaggtgatcctcccacctcagtgtctgcagtagctaggactacaggcttgtaccactatgcctggctaatttttgtatttttttgtagagatggagtttcactatgttgcccaggctggtctggaactcctgggctcaagggatctgcttacctcggcctcctaaagtgctagatttacaggtgtgagccactgtgcccaacgcaatttcttcatttctaatacagtgataataatcttatgaaatatcagaatgagataatacttataaaagtacattgtaaactgtaaaatgccatatgtatttaggtagttgttaataggtttatatctggatatcttaaaaatgtattgccaacttcttgtcttaatgcagcacagggaatataatttaacttttattaatggttcaaagtcattattttgattatttatcataatatggagtaaattgataccttagagggtttatttcattctcagaattctctcaaactgttttgtagctgtcattgattgattgtttttctgtcttcctcctctggtgacctcagaggctattgaggtttatagtatttatgactatttactaagtggctccagaccactgccatattttagttgatttttgtttctgcaacttttttggctatcagttttttattttgctgccttttcccttcctaatatgttagtatctaagtatctgggcagagttaaagtctacaaggaaaaaaacctcacattttaaggtttgcttaagtaaatagagaagcagttatttctgcttctgtcaaattaaatggaaaaggcttaaaagtagcttttttttttttttttttttttttttttgagatgaagtctcactctgttgcttaagccggagtgcagtggcgcaatctcggctcactgcagcctccacctcctgggttcaagcaattctcctgcctcagcctccctaatagctgggattacaggtgtctgccaccatgcctggctaacttttgtatttttagtagagatgggaccaggatggtctttatctcctgacctcgtgatccatccgcttcggcctcccgaagtactgggattacaggtgtgagccactgcgcccagccaaaagtagcttctaagtacaaaatsgttgttctacatagttgtggatatggttcctggttgtttacccctattcagataaataggatattattaaatgtatttacaactaacatttagttttctttaatgctcagaaatcatatttgtatttcaggttcttttttatcttggccagtatattatgactaaacgattatatgatgagaagcaacaacatattgtatattgttcaaatgatcttctaggagatttgtttggcgtgccaagcttctctgtgaaagagcacaggtaattcttcagtttagtccattgtaaaaagccatctgggctaacatttcagttcacctctaccctcattcacttttgtcagagaaaaactgttgaaacatattaaagacatgctgaaacttaattttttagctctgcggcatattatttgagaacctgagctctggcatcttataaaccagtgtttgaaacctagcccaatcatttactagttttgtgactagataaattaacctttttaaacctgcttccccatttataaaatagggataattaaatacttcatgtggaggttaaagctcttgaagagagacgttgtataaaaaagcatagttttgggcacatacaaagcattcaagtattagctgtagctattataactttttattccagaaacagtataccaccacgtggtaaaggcttacatttgagccttagttattttggagatcattttcattgtcacctatcattatggcacttaaccagcagaatttaacccaggtaatatttctagaaataggcctggtgcggtggctcacacctgtaatcccagcactttgagaggccaaggcgggtggatcacctgaggttgggagttggagaccagcctsaccaacatggagaaaccctgtctctactaaaaatacaaaattagctgggtgtggtggtgcatgcctgtaattccagctactcgggaggctgaggcagtagaatcacttgaaccaggyaggtggaggttgtggttgaggtgagccgagattgcgacactgcactccagcctgggcaacgagcaaaactgcatctgaaaaaaaaatttttttaatatatatttttctaaaattattcttttttttgtttgtttgttttgagagggagtcttgctctatggcccaggctggagtgcagtggcatgatcttggctcactgcaacmtccgtctcctgggttcaagtgattctcctgcctcggcttcccgagtagctgggattacaggtgcctgctgccatgcctaatttttgtatttttagtagagacagggtttcacgatgttgaccaggctggtcttgagctcctaaccttcggtaatccacctgccatggcctcccaaagtgctgggattacagatgtgagcaaccacacccggcctacatttggaattctttgtcacatttggtttagcacaggcaatccgtgttgagccttagcattcattacattaataaatggaatgaatacgttcacctgagacaattaactagcttctgctagtatttaatgctcartagtatagctgaaaagatgataattaaatgggattttattttattaaaaaacataacttcctcagctgagcaagggattttataactttaaaacaaccttattattgtaaacatagtatatattattattgaacattaggagatgacagaaaactaagaaaagtaaaggaaaaaaaaggactgtagtttgttaacaaaaggtatttttaccagtcatttgtgtattatgtgcaactgtgtgttttaacctagttatgaatatagtactatatttaaatttcatctagcttcttaatttgtattataatttgtatattatatattataatatacatataatataattatatatattacaaatatatgtataattattattttttattgatgagtcacttctgtttaatatccatatatgttgtcattttatacgtggccttggtatatatggtttaattttataaattttaaaaataactatattggtatattggtgatttctttacctattgaatattgaatcttctattttttttcttttttttttgagatgaagtcttgctctgttgcccaggctgcaacctctgcctcctgggttcaagcgattctcttgcctcagcctcctgagtagctgggattacaggtgcacactactatgagcagctaattttttgtatttttagtagagatggggttttgccatgttggccaggctggtctcgaactcctgacttcaagtgatctgcctgtcttggcctcccaaagtgctgggattacagacgtgagccactgtgcctggtctgaatattgaatcttcggayaatgtttggaagtatgatttccttggacttgaattctaaatgttgagagataagaaataggagaaattactgacttgaaaaggatatgaattaaaaatattgtgggtttaggttgctgtatccttattcccaaggatgaaaaaagatagttgggattcatatttcctcttaatattgagtgagaaacaatattttgtgacaaacactctcttaaatccttagtttaaaaacaaaaggaaaaatccattgtgacatcaacgaatactggggtaaatgaattatcctcctgttaggatataaacttcatgagggcatatacatttctgtttcattctttgttttcccccgtgtctggtacatagtaccagtgactggtacgtggtaggttttcagtctgtatttattgaatgaatgagtactgctttatctgttaataagtttcttttttttcttccctgagtcggagttttgctcttgttgcccaggctggagtgcaatggcgtgatcttggctcaccgcaacctctgcctcccgggtttaagtgattatcccgcctcagtctcctgagtagctgggattacaggcatgcgccaccatgcccagctaattttatatttttagtagagatggggtttctccatgttggtcaggctggtcttgagctccaggcctcgggtgatctgccggactcggccttccgaagtgctgggattacaggtgtctgtgagccactgcgcccggcctctgttaatacgttttaagatcaagaaaggaagttgaagcttgatgaaagtcaagattataatcaaattcctatttaatggattttgcgtaactcaatagtttttttggcagtttgtatttaatggattttgcataactcaatgcttttttttggcagtttgctactaagcacagagctaaaaacattcctgtttgaaaataagtatgttcaacctcttcctgcttgcatactcattttttgggggtcttctggtaaagtccaaacaaagcacatttcaggaattggtagtgtgaaatctttcagctagagagactttagtaattattaaaagtagctgtacataatcattgtgctactaattattgtgcttttaagtgcctacaagcttgccaatgataaatttggttttgaatgtgtgcagtagttcatactaagtatgtatgtagaagtctggttagatccagcttaatacaaatttttattctaaaatgtacatctcttgttattttttttttttctgtctacaaggaaaatatataccatgatctacaggaacttggtagtagtcaatcagcagggtaagttaattttgagcatcatggataaataccataaaaacgttttaaagacatttttgtttatgtgcatatgttttataattgtgattctctttaaaagttgctttaattaaatattgtaataaaagtatgataaatttattagaagtacatatgaactaaaaccacatactgaggttctaatgtaaagttaaatatcctgttagatcaatttagacttgggatatcagagttaggatttattttgaaaggtctgtaatttcaaaagctcctgtttaggagtgatctaccttgaaaatgtattgaaaggctttgggaaataatattgttacctaggtaggaccatgtgtaaggatgaaggatgagtctttttctttggttatagacaaaattttgtttaccaatttgtggaagtggaattttatgttcctacttccgtttcttaactggttatttttgggtcacatctctctttaataagctgataaaagcattgggttcttgttccagaaagatgcacatgtatatatacatggrtaagtcaataagtgttttacaacctactttccatgagaaaagccctgatttatgtgcttgctgacttccatagtataatactctcatttgaaggctaaaaacatggagttgggaagagatgtacacagtttgctttttttttttttttttttttgagaaggaatcttgctctgtcactcaggctggagtgtagtggcatgatytcgactcactgcaacctccgcctcccaggttcaagcaattcttctgcctcagcctcccgagtagatgggactacaggcgtatgccaccacgcccggctaatttttgtatttttagtagagagggggtttcagcatgttggccaggctggtctcgaactcctgaccttgtgatctgcctgcctcggccttccaaagtcctgggattacaggtatgagccactgcacccggtctcacagtttgcttttgagtgctgcttagagctgtctctaatacactacactgctcctaaagcccatcctcgaactacagttaagaaatgctcttaggccaggtgtgatggctcatgcctataattccagcactttaggaggctaaggcaggaggatcacttgagccgaggagttcaagaccagcctgggcagcatggcaaaatcctaactctgcaaaaactacaaaaatcagcttggtatagtggtgcatgcctgtagtcctagctactcaggaggctgaggcaggaggattttttgaggctgggaggtcaggactgtagtgaactgtgatcatgccatccagtccaggtgacagagcaagacctcatctcttaaaaaagacaaaaacaaaacaaaacawaaaaacacctctcaggagcttgtttagttcctagaatgaattgaccactcccttgtacttcctctattccatattcagattttattgtaaaattgctttgttttacttgtgggtttttttgtttgtttttgagatgggctctcactctgtcaccctgcttgaagtgcagtggtaatcttggctcactgcatcctccacctccagggctcaaatgatcctccccctcagcctcccaagttgctgggactacagatgtgctccaccacgcctggctaatttttctgtatgtttggtagagacggtgttgctatgttgcccaggctagtcttgacctgagctcaagagatattctcacctcggcctcccaaagtttaggggttacaggcatgagccactgcgtctggctgttgcacttgtttatatttttgttacctgtgtcctattcaggtttgcattgtgcatcacacactatagtgttttattaatatggtatttaataaatgtgttgaattgaatacttattcttccaaagttaggatttaaagcccagaaaagtatctccattttatcccaaaataaaagtagttattaggctgatgatttggcattttattgttttaaagctctttttttttttgagctttagattgtatcctttttatttcctttttttttaattattatactttaagttttagggtacatgtgtacaatgtgcaggttggttacatatgtatacctgttgttttaaagctctttaagaaattgtgtgatagctaaatatacaattgtagtatttgtagtagtagtttgagttttctgaagtatgtaaccctgatgtattcattccttcatttgtttaaataaactttggcacattactagaaaaattgtattattgagatggaaacttacaaattacttatttgcagtctgagtttggtttagatatcagtagaattaacttcagaactcctattccatgttctcaactttgtcacttttttttttttgagatggagtctcactctgtcacccaggctggagtgcagtggtgcgatctcggatcactgcaacctctgcttcccgggtttaagtgattctccttcctcagcctcccgagtaggtgggattacaggygcctgccaccacgtccggttaatttttgtatttttagtagagaaagggtttcaccatgttgaccaggctggtctcaaactcctgacctcaggtgatcctcccaccttggcctcccaaagtgctgggattacargtgtgagccactgcacccacccagcctagggcttcctttttattacatcttttttgtagcatctgtttatactaatccaaaattcctggacaatataacctattatgtacaacttaagaaaattagtgtaatgccttacccatagtataaagagaaaattaatctatgataatgcataatttcaaaatgttaatgtccaggcatgagttcactgttaagatgaaaatgtttccaaggggggtagtaaagggtatttgatgataattgtctgtatatcccaactctgaaactttgacttttgagctcaaagtctgtatatccaactacaaatgaaacctatgtgcctgaataactcagtttgttatcttcccatccaatctgtttatctttctaaagtttctcttttagtgaatggtaccactcatttattcacccaagttggaatcttggaatcatcttaactcctttcttccttgccttctatatcaaataccaggtcttgttggtttttacctatttaatttctctggaatttgttttccatgccttagtttaggctttaatagtttttagtttgtattattgcaattgtctaatactggttttcctgcctctgccctctttttcttatgttttgctagagtgatttgtcactcttctgcttaaaattaccatttaggggttcattattgctctctggatgtaatattttctgtgagctagaaatcagtttcatttcttggacaaaaatcctttttaatggtgagtggctgcaacatcgcattaaggaagattctgaagtatctgcggggaagaatgcagtgataagggaatgacagcatgagtcctgctttggctagaccacaggatcctttacagtctgaacctgcctacattccagtaataatgaactgcttgtggtgtcctgcaacaggaactgttgttagtttgcttttggatactttttcacatggcgttttcttggtctggaatggcctttcctagccctattttcatattgtcctacaaaatatttcctgattctttgtttctcagacactccctgtccctaccaaaataatgactctcctgtctctctgctaatttatctaacagtcttttaatgtcttgattatactttactcttctacattaaagttgaattattttatttacatctgcaacatttagtatgaggwtgccacctggaaaatacatgtttaatgtttattgaaaggtnaaattgcataagggtttgtgttagactgatagcatatctactgagtagcgccccgccgccccccgcccaccaccaagtttctgatcctttttcttttctctcagaatcatcggactcaggtacatctgtgagtgagaacaggtgtcaccttgaaggtgggagtgatcaaaaggtaatctaagtaaatttctcattctaatgtaatattatttgcaaattggaaaggttatttacaacaagttagcttactggttatgttaagtttgttgtattttatttttttcctaaatgcttaggaccttgtacaagagcttcaggaagagaaaccttcatcttcacatttggtttctagaccatctacctcatctagaaggagagcaattagtgagacaggtatatatgaatatttatttgacgcattcacacagctttttgatattctttctstaatgaaattagtgcttttagacttaattaaattgttccctttttttggttgagatgaattaacctctgagtttttttcattcgtgattttatttgatttacaaattgcttatttagcaatatttttctggctgactacagcaggcacagtttactgtgccccactggagtttatagttagccaactctctgttaagatagtaggaggtggctggggtgtggtggctcacgcctggctcacgcctgtaatcccggcactttgggaggccgaggcwggmggatcacgaggtcaggagttcragaccagcctgaccaacgtggtgaaaccccatctctactaaaaaaaawacaaaaagtagctgggcctggtggcgcacacttgtaatccagctactcaggaggttgaggaaggagaatcacttcaacccgggaggtagaagttacagtgagccgaaattgcgccactgcactccagcctgggtaaccgtgtgagacttcgtctaaaaagaaagataataggagacaggcatataaactctattttcaccattattcttagtcaccttaacagttaaatttttaaattgttatttttaataaatggtagtacatacctatgagttttaaaacagaaagtaaatagcattttagaaatgaagagataagggccgggcgcagtggctcacgcctgtaatcccagcactttgggaggccgaggcgggtggatcatgaggtcaggagatcgagaccatcctgtctaacatggtgaaaccccatctctactaaaaatacaaaaaattagctggatgtggtggcgggtgcctgtagtcccagctactcgggaggctgaggcaggagaatggcatgaactggggaggcagagcttacagtgagccgagatcacgccactgcactccgcctgggcgacacagtgagactgtctaaaaaaaagagagagagagaaaatagttgacagagagaaaatagttgagaacagttagtagacrtagtagacgagaaggctgttgcctgaggaagtcgcagtaactaagaccgtatgattcagatgaaagagaatgtcagatcagtgaaacagaataaatgaacccagaccagaatctcgtacatgcgggcagaagacaggaagggcagaggtgtctagggcagaggtggaactagaacaaatggtagttacttggggaaaaggtgaagttagatctgtaccttatgccaaaatgaatttcaaatgagtttaaaagttaaatgaaaaatagaatacaacatatttgaaagatagtcactttaaatttgactgttaatatctgtattacataaaaagtcttcccaaatcaataaggaaaacattaaaacttcaaatagcaaaaagggcagacagttcacaaaaatttctcacagtaaatacgaatgactaataaatatggggagagggtgaattttggtgatttttagctttacagatagtaaaaaatgccaaaagggtgtccttttgatctatcaaattagtaaaaataaaatttttactcatccttactcatcagtgctaataacttgtgtattagcactgataaactgttggtctgtaaattggtaaaagtgggtaaaaattgattaaatttttcggattataaaaaagcttagatggcctggtgcggtggctcacacctgtaatcccagcactttggaaggccgaagcgggtggatctcttgaggttaagagttcgagaccaacctggccaacatggtgaaaccccatctctattaaaaatacaaaaattagccaggtgtggtggcaggcgcctgtaatcccagctacttgggaggctgaggcaggagaatcgcttgaacctgggatgtggaggttgcagtgaaccaaggtcgcaccactgcactccagcctggggtacagagtgagactccmtctyaaaaaaaaaaaaaaaagaaaagaaaaaaaagtcttagagttcttaacattatcctagtaactccatttctagtaatctatcctaaggatgtaataaaaaattcaaagatttatatgtagagatactaattacagcattatttataattgcagcccggccaagatcacctttttaaaaatagggaacacaaacatgattaagaactcacgtgcagaacttgtgatctcgataaaacgtaaaaatcccggccaggtccagtggctcacgcctgtaatcccagcaccttgggaggccgaggagggaggatcacgaggtcaggagattgagaccatcctggctaacacggtgaaaccccgtctctactaaaaatacaaaaaaaattagccgggcacagtggtgggcacctgtagtcccagctattcaggaggctgaggcaggagaattgcttgaacccaggaggtggaggttgcagtgtgccgagattgtgccattatactccagcctgggggacaagagtgagactttgtctcaagaaaatgataaaaaaagtcctttcagaaatctgtgatactatctcattttaatttttgtcattctcatgggtgaaaaatgatatcatttcactttgcatttctttgatccctaggaggtaagagtttttttttctattactcaagtacatgactcaagatttttcatatgtttattagtcatttgtatttcttctgtgacttgctttttcctgtttccttaaaagaaaatacagtctatcttgatttggtaggactttgtataatatgtatactatgggtaatttttactatatatgttgcagatattatcttcgaatttgacctttgccttttaacttttgtttggtattttattttgtcatgtaaaccttgacatggtctaatcttgatagtctttttattgaggactttgcagtattatgaaatacttctccaccccagcattataagaatattttgttataggtacttgaatggttttgttctttatatttagatctttaatccacctggaattcatttttatgtctagtataaggtagtattctcatttatgtctaacggatttgtctaacattctgacccattcagagataatttattatttaaaatgaaatggaaactttttactggttttgatttctgtttaaaatatagggtactgaagagccgggcttagtggcttaggcctgtaatcccagcactttgggaggctgaggcaggaggatcacttaaggccaggagtttgagaccagtgtggccaacatggtgaaaccctgtctctaccaaaaatacaaaaattatccaggcatggtggtgtgcacctttaatcccagctacttggaagctgaagtcacaagaatsacttgaacctgggaggcagaggttgcaatgagctgagaatgtaccactgcactccagcctgggtggtcgagtgtgactctgtctcaaaagaaaaagtgtagggtactgaagaaattgaaacattaagaataccatatgagtaaattaaacactttggctcttttcggaaaaaaacagatgagctyttatattttaaagtttggttttgacagaaaaaaattcctagattttttggttaataaaaactttattagatagattaaattgtgatgtatggagataaagttctgaaagaagaatagaaagctttttaaaaatagtattctcagcctaggcaacatggtgaaaccctgtctatgcaaaaaatacaaaatggtgcattcctatggtaccgttcctatggtaccagctactcgggaggctgaggttgaggtgggaggatcacttgagcccatgaggcagaggttgcagtgagccgagattgtgcctctgtactccagcctgggtgacagagyaagaccctttctcagamaataaataaataaacaaataaataaatacacacagatagtgttctgctgtaacagttggacagattcaataaaacagtgttaacttttgaactaattttattgaaastaagtttctgtacaaataggtactcaaaacagctcaattttctaaatcacagtacagcaatttattttttttccttacatatccagaagaaaattcagatgaattatctggtgaacgacaaagaaaacgccacaaatctgatagtatttccctttcctttgatgaaagcytggctctgtgtgtaataagggagatatgttgtgaaagaagcagtagcagtgaatctacagggacgccatcgaatccggtaatgttctcattttaagtaaggcaagactcttactgttcaaagtctagtcctggcagtcctaataaggatacggatagaatgtacatgtgtcttacgagattgatagaaaacacagtgctaaattttactttaaaataaaactactatattgatctccaccttcaacccaaggtattgtgagaaatgtggaaaatagtggagtaacaccggtattggtaaaattagtagtagtattagtaattatcaatgtcactgtatgtattagagaatatttgtggaccactgcaccaatagtacagtcaaataaattggagtatagagttgtttgagaatttgagagttacactttttaaaaaaggaacaaaaccaaaaatttggttcagttaaatattttagcattttaaggcaaatttgactatttagagtaaaaatatattttattacagccatcagcaaaaaagtcagcatagtctgaacttaacatttgccaaataggtctagacatcaggtaagttctatttacttatgctgtaaaatacaggtttatactgggctgggtgcggtggctcatgcctgtaatcagtactttcggaggctgaggcgggtggatcacctgaggtcaggagttcaagaccagcatggccaacaagatgaaaccatgtctttactgaaaatacaaaaattagccaggcgtggtggcgcatgcttgcagtcccagctacttgggggcctgaggcaggagaatcgctcgaacccaggagttggaggttgcagtgagctgagattgtgccactgcactctagcctgggtgacagagcgagactccatctcaaaaaaaaaaaaaaaaaatgcaggtttattattgcatggatgacgggagagtatcagtactttctcattactaatacagacttccaaaatattagtgagcagcatttcttaagagatgtyactgaaagaagtttggtaaaaaatttttttgttaacaagaatgcttgacaaatggaatattttgttttgtatgtctttaatcaagcttgtccaacccatgscctgtgggccatatgccaggatggctttgaatgtggcccaacacaaattcataaactttcttaaaatattatgatttttttttttacaattttttttctgctcatcagctattgttagtgtattttatgtgtggcccaagacaattcttccaatgtcgcccacggaaaccaaaggrttggatacattttttggtaatatggcagtgtctcatggccattattctgggtattagtaatcattgtatagtactctagaagatgtaggaagtggaaccaattgtgatagtaatcctagtyttttacctattcttgttacttcctgtattatctttttttctcttccaaagcagtgattgtatgaacgcatacctgccctctagagttactgtacctaacggagctgttacttatgtagaccgctagatggcatgatgagctcctgctcagtctgagagcaggttcttcatttgtagatatttaagtttataccaaattccatacagttgagatggcactgcagatacagtggtagtcaaggtagatatggttcttgccttcattgggagatagatcattaatgacaaaaatgaaaacatttaataaatccagtggaaaaaataggctcttgagmggaaatatatgtgataaaattgaatccaattaaaacttgatgagtatccaacctacaagtttggttaaaaagagaattattataccctatttatttatttattgagattgagtctctctgtctcccaggctggagtgcagtggtgcaatcttggctcactgcaacctccacctccccggttcaggcgattctcatgtctcagcctcctgagtagctgggattacaggctcccatcaccacacctggctaatttttgtatttttagtagagatggggtttcactatgttggccaggctggtcttgagctcctgacctcaagtgatctgcctgccttggcctcccaaagtgttgggattacagatgtgagccacctgcccggacccctatttaatgtatagtttttgttaaagttatatcagaattctagctgaatgatatttagagtccttgttcctgctttgtacctgggacactgccttgttactgatatggctttgaggagtagaggaacaccaggttttttgttttgagttgaattagataaaacgacacggacacacgtggagtggttttaaggagcagagcgtttaataggcaagaagggagaaggcagaaggaagaagctcccccttacacagacagagggaggggggctctaaagctgaaagaggagaccttacattctgacaatactagccagttttatgtgacggctggagggggtggtgtcttatttgcatagggctcagaggattggtttgaccaggcatgtcatttagccctcaagaaaactggccctcccaccccagtcctttaatacacaaatgcaggatgccatgacattttacacacggggttatgtgggggcggccatgctgttaggtacctgatggagcaagggcaagaggacaacggtgggaatcgccatgttgggtggaccctcttgcatttgcatcttaaaggttgccagcctttaagagccagggcttttatgctagacaagaaatttttctggagctacgaaaaaccttccaaggaccacttttcctctccatttgcctaaaataatttcttaataactcgtgtggagtagaggggtatttctttttttctttttgttagtcctgtcctgcattctcttaaaaaatcctatctataaaaaatctcagccgggcgtggtggctcatgcctgtaatcccagcactttggraggcccaggcgggcggatcacctgaggtcaggagttcaggaccagcctcgccaacatgttgtgaaamcccatctctactaaaaataccaaaaattagctgggcatagtggcgggcacctgtaatctagctactcaggaggctgagacaggagaatcgcttgaacccgggaggcggaggttgcagtgagctgagatcacgccattgcactgcagcctgggcaacgagaacgaaattccatctcaaacaacaacaacaaaatctcgtttttcaggttaagtccctagttgtgaaagcttttggtagggccagtttttttttcttcttcgttttaatttccctcatttgagaatgttgtagtcatcattgggtgtcatcattcaccagtttgtgaagggagttaaaggaaagtgcattcctctcccatcttttctttctttggggtttaataaattgtgggaaactaagactgtgttctagactgtacaccatgcagtttatattatgatcttctgtcatctttgcagcctcagattccatttttagctaagactggggttttaaataacttgtttaaggttcctacaactaattgtcacaattggaattcaaacaattctaggtatttttgactacaaagatctaagatctttgcagagcaagcctatctgatgcttaaaaaaatatatattttttaaatttttgagacagtctctcactccgttgcccaggcgggagtgcagcgcatgatcatggcttactgcaacctcaacctcctgggttcaagcaatccttcctcctcagccttgagagttagctgggactacaggtgtgcaccaccacacctggctaattttttttactttttttttttcagagatgagatcttggcctgttgcccaggctggtctcaaaccgctgggcttatgtgattctcctgctttggctcccagagtattgggattacaggcatgagccaccacctccagcctgatgctttttaaatatatagtatttaggtctggtgcagtggctcatgcttgtaatcccagcactttgggaggctgaggcgggcggatcacaaggtcaggagatcgagaccatcctggctaacacggcgaaaccccgtctctactaaaaatacaaaaaattagccgggcgtggtggcgggcacctatagtcccagccactggggaggctgargcaggagaatggcgtgaacccaggaggtggagcttgcagtgagccgagatggtgccactgcactccagcctgggtgacagagygagactctgtctccaaaaaaaaaaaaaaaaaaaaaaaatatatatatatatatatttatatttaaataatgtataaatatataatatataattataaatctattatatattaatgtatattatatattacattgttatatatatttatataattatatatttatataaatataaatatatatatttatataaatataaaaatatatttatataaatataaaaatatatatttatgtaaatataaatgggcaggcacctgtatatattatatatattactatttatataaatataaatatatattttaaatatttattttatatattttaaaaatatatatatagagagataatttaatagtttctggggcattcttttgcgaacattagccaaaactttaaaaaccactcccaatattgcattttttcatggtattttttatagtatttttatagtatcctaggacaggagttggcaaactttctgtaaagagccacatagttaattatttgggctctgccgggccatggtttctgtcacagctactcagccccgctcttgtaatgcaggagcaactgtagacaacaagtcaacaaataggcatggctgtgttcaataaaactttatttataaaagtcgatgggtgatgggccacagtttgcagacccctaccgtagagtatgttttctgagatttaatgtttcttgtgatttacccccttattctaaaattagtgcactaaagactttagttagttgaagtatttggtttgttgggttactttgttagtgttaattgtatcctaacttgacttgtgattctaatctgattggtagtagagcccttgttaggaatttgagctgcaacttgatgaatgttgcttttactctccttcctaacattactctaaaaaagtcttttgatgtcagaggctgtaaaataatatactttgtttctgtttttaaaactgatacagatatggaaatcatttaatctaagctccttttctagatgaagtagctacagcctttagaagttaaatgatatgggctgggcgaggtggctcacaggtgtaatcccagcattttgggaggccgaggtggcggatcactagaggtcaggatttcgagaccagcccagccaacatgacraaaccccgtctccactaaaaacataaaaattagccgggtgtggtagtggacacctgtaatctcagctacttgggaggctgaggcaggagaatagcttgaaccccggaggcggaggttgcagtgagctgagatcatgccactgcatttcatcttgggtgacagagcaagactcttgtctcaaaaaaaraaagggccgggcatggtggctcacacctgtaatcctaacactttgggaggccaaggcggttgaattgcttgaggtcaggagttcaagaccagcctggccaacatggtgaagccctgcctctactaaaaatacaaaaattagccaggcatggtggcatgcgcctgtagtcccagctacttgggaggctgaggcaggagaattgcttgaacttgggaggtgtaggttgcagtgagctgagatcaggccactgcactccakcctgggtgatggagcaagattccatctcaaaataaataaaataagttaaatgatgttgtttaaggttaaattagctacttagtggcaagtgtagaataagccatatcccgacttctagactttttccaattgtagccttctgcttatatatgctcctacccttagccactgacagcaaatattattgccctgaaggtcttactaggttcttatacaatttattgaagtcctgaaacgaagaatcagatgagcagctacagaattttttttaattgtctaaaggctctttaaaagaaaatctcaaagtttattaaaaaacataagtatctatgactcgagacatttttctaagaaaaaaaacccataagtattacaagtgttgtgtcttgttacgtgtattctaccaatttggacatagaaagatgagtgacaggttttagctcaaagtatatataattcagatgagaaacatgcctgcaaaattatgttttgcataatttatgtgtgagactatataattcattattatacaagtagtaaggataattaaaggtggaagagccttttcagttatggtattgacaaaggcttagtcaaagaaggatgaataggattttgaaactgaaattattctrgttagagggggaaagtgtggaagttgaaatgccaagattagttgaggaagcaatctagatctggcgggattatccatatttagtaagggaggaggggtgtctagttgaagacagacgaagatgttaatacagtcacactgtaggtactttcgatgccaagaggctttggtgtttttcctttatgcagtggggttttgaacagggaaaataatgtagtaataaccttgaaaccttaatctagtttcagtatgcaggatggatctgaggaggaaatgtgcgtggcaaccggctccgggatggctggctggggggcctagtcttctgcccgccgatctscctcgggaagtcccggatcagagcagcaggcccatcccccaactgttacaccctgctggcagcagcagaggcacagggatgagttaggaaacagatacagaggtcaagaggtgatgtttattaagttatatatttttttcttgttttaggatcttgatgctggtgtaagtgaacattcaggtgattggttggatcaggattcagtttcagatcagtttagtgtagaatttgaagttgaatctctcgactcagaagattatagccttagtgaagaaggacaagaactctcagatgaagatgatgaggtagtattttttttcccctctaattatattggaaaattattaaatattttctatgttcattgactttgagattgaaataatattattcagatttcacttgaaatctttacctcttgatttgtttaaactaacacattggtttgtggacttgaggatttcatagttctttatcatctgatttatattattatattactactaattgccaagaagtcaatagacctcaatgaacatgcttattataatggtctgttcacttttaaaaacatataattcaactactgttttaatattaacttactttctataaaagtaaaacatgcatacagttaaagtcaagtagtacccttagagatctgtttcccagaagtgactgcctttaacatttctagctatttccctattatttaatatctccatattakttatttatgaagtaaaaccacctagctgaatgttttgttttattcatcctaaacatcctttgtattgacttttaccattgtgggtaaggatttctctctcctccattttttccccctttacactcacttactctatttgatattgtctaaggctttctcatatattgtagtacatgatatttgtttaggacttattactaggaagccttctgattgaaggaaatagggcgatgaattgatgctaatgaatgtgttttattaggtatatcaagttactgtgtatcaggcaggggagagtgatacagattcatttgaagaagatcctgaaatttccttagctgtaagtatacatctacttttttaagaaataaaaatttcattaaggtcaagattaggagactatatctagcttctttctgaaatgaactgatttttataaagttaaaatgtttttgtaaagtctgaataatttaaagcatttttcttttatttgttgtgatgagacctgtagctataatttttatttttaggtgctggaatttgaacttttttttttttttttttaaacagggtcttacccttctcccaagctggagtgcagtggtgcaatctcagtgcactgcagcctccacctcccaggttcaagtgattctcgtgcctcagtctcctgagtagctggaattacaggcatgcaccactataccccactaatttttttatttttagtagagatggggtttcaccatgttggccaggctggtcatgaactcctgacctcaagtgatctgcccaccttggtctctcaaagtgctgggattacaagcatgagtcactgcccagctgaatttgtacattttgatgttattttggaaaattymrgtgtatctccagtatactcatcacccagctttaactattaccaacattttgccaaccttgtcaaacgtaaacttttttttttttcaattgagatagggtcctgccctgtcttccaggctggagtgcagtgatgtgatcatggctcactgcagcccccacctcccaggctcaagtgatcctcccacctcagcctcctgagtagctggaataacaggtgcatgccatcacaccccagctaatttttgtattttttgtagaaatgtcaccatgttgcccaggatggtcttgaactcctgggctcaagtgatccacctgcctcagtctcccaaagtgcaaggattacaggtgtgagccatcacacccagccaaatgtaaacatttttattactgatttgtattatagaatgtggtaggatttgccattaaagaaattaacacttaaatgtttacatctcatgcatacttcactgagttcctgaggtattataggtttttttaaaactattgtgctttagtttttgttcttaatattgcctttattatatttgaataggaaataaattccattttttctgagttatagacagttactaattattcaagtgcaaaaaaggatgaaaattcaagagtttccaaaatttttactgtattagaaaataaataactaattgaatcatttgatgtcaagttgagtaaaatattttagatacttttaattttttaaatctattttaagactcaaattattttagatattcatcttggaatttattggactttttgatgcacttttactcccatattgcaagacctttttctttggttttatgagctgtgaaaaacccccttctataacttgaaaaaagaagaatgaatagtctatctttattgctcctgtcttaacatcatttrtgaggcaatctcaaaatggttacggaaatacctcttacttaagagttttcacttgttaaatgtcctcaggcaagaaccatgcttcagctaaggcaagaagataggttatgtaaaaaggctggggatgtgggagagtttgttatccaaattgcatggtggaaaggtttgtgggataaaacgttgggaaaaggaagaagcattgagcagttacaaagatgagaacacaggaaaggatagacaggtaaaggaaaggatattacggttagtgaccaaggatgataggttttagcagcaatacttgctgtgaaaaatgttttagcatttctcttgtggatggagttagggaatactcagttaagccatggttttagagtacttctaaggtagttctagtcactggtggattaggaagtctttctcgaggaggcaggtttcatctagattgatgggatggactcttggaatagcgcctagggttgagcctttaagggagtggatataggctgcatgacagagtaaaagatcccatagacttgcttcaactaaaggaagcaactgcatttgtatcctgaaacagataactttataggtacatgattaatatcacatcacagttaatatatttttagtttagaatttttcaggatggtaagggtgaaaaaaatgggtgtacttactctactttaggagagactgttacatattgacctttaaaaatctgttttgtgtataattgagacatataacgtgatgttttgacacacatgtaaatagtgaaatgatcactacagtcaagcaaattaatgtaatccrttatcttgaatagttaacctttcttgtgtgtatggttaaaatacctaaaatctattcttttagtaaatttccagtataccaatatataactaactatagtcctcatgctgtttacagtgactattttatataaaacatgaaacactgaatattgagccctatgatatactttaccttagacatagcaaagttgctagcattcctgtgactgagcagttaaagggttacagaaactgactgtgtgtcttatttcattgaaggactattggaaatgcacttcatgcaatgaaatgaatcccccccttccatcacattgcaacagatgttgggcccttcgtgagaattggcttcctgaagataaagggaaagataaaggggaaatctctgagaaagccaaactggaaaactcaacacaagctgargagggctttgatgttcctgattgtaaaaaaactatagtgaatgattccagagagtcatgtgttgaggaaaatgatgataaaattacacaagcttcacaatcacaagaaagtgaagactattctcagccatcaacttctagtagcattatttatagcagccaagaagatgtgaaagagtttgaaagggaagaaacccaagacaaagaagagagtgtggaatctagtttgccccttaatgccattgaaccttgtgtgatttgtcaaggtcgacctaaaaatggttgcattgtccatggcaaaacaggacatcttatggcctgctttacatgtgcaaagaagctaaagaaaaggaataagccctgcccagtatgtagacaaccaattcaaatgattgtgctaacttatttcccctagttgayctgtctataagagaattatatatttctaactatataaccctaggaatttagacaacctgaaatttattcacatatatcaaagtgagaaaatgcctcaattcacatagatttcttctctttagtataattgacctactttggtagtggaatagtgaatacttactataatttgacttgaatatgtagctcatcctttacaccaactcctaattttaaataatttctactctgtcttaaatgagaagtacttggtttttttttttcttaaatatgtatatgacatttaaatgtaacttattattttttttgagaccgagtcttgctctgttacccaggctggagtgcagtggcgtgatcttggctcactgcaagctctgcctcccgggttcgcaccattctcctgcctcagcctcccaattagcttggcctacagtcatctgccaccacacctggctaattttttgtacttttagtagagacagggtttcaccgtgttagccaggatggtctcgatctcctgacctcgtgatccgcccacctcggcctcccaaagtgctgggattacaggcatgagccaccgcgtccggcctaaatgtcacttagtacctttgatataaagagaaaatgtgtgaaagatttagttttttgtttttttgtttgtttgtttgtttgtttgttttgagatgagtctctctgtcgcccaggctggagtgcagtgtcatgatctagcagtctccgcttcccgggttcaagccattctcctggctcagcctctggagcagctgggattacaggcatgcaccaccatgcccagctaatttttgtatttttagtagagatagggtttcaccatgttggccaggctggtcacgaactcctgacctcaagtgaggtcacccgcctcggcctcccgaagtgctgggattgcagatgtgagccaccatgtccagccaagaattagtatttaaattttagatactcttttttttttttttttttttttttgagacagagtcttgctccatcacccatgctagagtgcagtggagtgatctcggctcactgcaacttccgccttctgggttcaagctattctcctgcctcagccttccaagtaactgggattacaggcatgtaccaccataccagctgatttttttgtatttttagtaaagacagggtttcaccatgttagccaggctgatcttgaactcctaaactcaagtgatctactcacctcagcctcccaaaatgctgggattacagatgtgaggcacctggcctcagatttttgatactcttaaaccttctgatccttagtttctctctccaaaatactctttctaggttaaaaaaaaaaaggctcttatatttggtgctatgtaaatgaaaatgttttttaggttttcttgatttaacaatagaracagggtctccctgtgttgcccaggctggtctcgaactcctgggctcaagagatcctcctgtctkggcctcgcaaagtgctaagtaggattacaggcgtkagccaccacacccggctgtaaaaatgtacttattctccagcctcttttgtataaaccatagtaagggatgggagtaatgatgttatctgtgaaaatagccaccatttacccgtaagacaaaacttgttaaagcctcctgagtctaacctagattacatcaggccctttttcacacacaaaaaaatcctttatgggatttaatggaatctgttgtttccccctaagttgaaaaacaactctaaracactttaaagtaccttcttggcctgggttacatggttcccagcctaggtttcagacttttgcttaaggccagttttagaaacccgtgaattcagaaaagttaattcagaaatttgataaacagaattgttatttaaaaactaactggaaagattgttaagttctttctgaattattcagaaattatgcatcattttccttcaagaatgacrgggtcagcatgtggaattccaagatacctcttgacttcctctcaagctccgtgtttggtcagtggaggcccatccgagctcagcactgagaagtgttagtttctttgggacccatctaccctgaccayatcatgatgttcatctgcagctgttgcaaggtgttcagattgtataaacataaatgtcacaaaaactttaaaagaagtgcaattctcaaaaggttaggtggactaaagcattctgtaaagcaactgctaataatgagcttacagtggatttgaatttgaaaaatatagtaacaagcctgtcaaatatctgcaagaactatggaataaaactactgatgcagtgaagacagttgaaaagatcaaacaaatgccaagctatatttataatgaacaaattcaagaaaaaggactacggaaagttcaggacatcaaagaagtcaggcaaaactcatcttgacccctgttgcaggcaaaggaacgcagctggaagaaaagatgatataacagttaacaggatgcagacatggcagaggtttcctaaaaatctcattatctataaccatttctatatttacatttgaaaatctcctttggagacttagaacctctaaattattgacttattttttatataaggtcactccgatgaaaggtgattacaaaatcatctacattgctgtctacaaaacagataatatggatgtttgatcgcatctcattgttaactctttactgatatgtttgtaaatacagaagtgaaatgtggacataaaatagttacgctatttggttaatggtactagacaacatgtaattaatgacattcaaaaatttatggctagtgatatatataaagtaaaattttctttgcagtaaaatatgccctttattatagaagggaggatataaggaaccaacagtttkkatgaaaatagctcaaataatatcttttattttgattttaatatttcttattttggtttattagtgtcttagaacaaaatggccttatataatgaagcctagttatgctggactgttttgatctcttttaattgttctgacagatagttggggatgagagccgaataaggtttgcctgaaataactgacactatataatttctgctttggcaaatactaagttctaacttgtcattcctggtagaacaagctttatttttcgagcctagcaawgatctagaagcagatgttatctcagtgccttttgcaatttgttgtgtgggtttttttttttttaaagccacacaataattttggaaaacaatgtatgggtagaacatgtgtctgttaattgcacacaaaaccacttttaatgggtacagagttaaatttgaaggaataagttctagctgaagtattatgaactccaaataatgctttgaggacctccaaaggtaaaagtactaatccctttggccatttattgagagagasagagagagagagtagggtgactatagttaatgtattgaatgttcttgctacaaataaatgatatttgagctgatgggtgtgctaattacactgatttgatcaatacccattgtatgtgaaacagtacatacaccatatttacaattatgtatttaacatttaaaatttctaatataagtatctctcaaactgtggattaacttcttgatttatatttaaatatgaatcttaagcaaaacagtgaaaataaccatcttgatttagtgtttttctcccatatgtgaattgtatatacttaggtgargacaataaaatcaactgaactgtaagcttagaataggactgaggtaattctgcacagcaactttactaatggtacattgttgcttcaaaactctctctctctctctctgtctgtctcaataaatggccaaagggattagtagtttacctgtggaggtcctccaagcattrtttggagttgataatacttcagctacaaccaagcagaatctcttttttttggaggtcctcgaagcattatttggagttgataatacttcagcttcaatttggagttgataatatttcagctagaacctagtagaatctgtttttttcctttggaggtcctcaaagcattattggagttcataatactgaagctagaaccaagcagaatctgtttttttctgaggagtatcggtagcataaatgtgattataaacatagtacacttgatatatggaggcagtgacagctatttttacaaaatttaaatctgcaaatggattcaacatgtttatgggttattaaaattgtctgatttcttaggttctttatagtacacgtgttgaaaataaatgattaagaattgtttcaagaatgcaattatttgatcttaaatttttatgagttgttaaaatagaaattatttgaatatcatatatttgggtaacaaaaggcacaagtctgaatgtgtttctttttctggaatggccatgcctgcccactgtagaaatacaaatatcacttgggcagcttgaagcagtggagcctcaatgagaccacctgaagaatgtggtcccagttagtagagtaagaaaggctggttctcccttttttttttgggtccctggccagcctggcctaagtgttcgtgattggtctataagggaggtacctggcacagggaggggagtttgggttaacccccgtaccacttgtcagcgtgaaaagtaagattgtactggcctgtttagttttcggcctcttcttggaaagttcccccaagctgggaacctcttgattgtgaggcacaaatgtaagtacatcagaaaaaaacaaaaaaactggctttaaagcaggagcttgtgggcccctaagccagacggggactagcttttggcattatataattaagattttttaaatccttaataagggttttattttatttttatttattttttgagacggagtcttgctctgtggctcaggctggagtacagtggtgcaatcttggctcactgcaacctctgcctcctggctgtgttcaagtggttctgcttcagcctcccaagtagctggggttagagcaccctgtcaccacgccccgctaatttttgtatttctagcagagatgaagtttcactatgttggccaggctgggctcaaactcctgacctcaagtgatctgcccgccttggccccccaaagtgctgtgattacaggcgtgagccgccacgcccagcctaataagggttttaaagataattagtgtgtaggtctgtaggcttatgatggtaaccacaagttgttaatggcattgtgaaaagtttttagttgcgctttatgggtggatgctgaattacattttgatttgatacttataaaaagaaaaagtatttcttcagcttaaaaaattgtttaaaagtttgtgatcatattgtctaccatgtagccagctttcaattatatgtaagagggactttttgacatttacaaataatactttgaggtagatatctgaaagcaccagcacttggaaggtgttcagaagtaacaaattataaaatgagctaacaaacgaaaggcaaaataaaaccgtaaagcaagcagatgggaggcgtgttcagtaacttattcataatgcatctgaaatgattgctgtactcaaatatttaacgttagagtaatagtattttgaatgaaaaccatagttgattgtctttagagagaggagtggtactgaaacatacttgaattcgtattgctttcctttaaagctctcctttaaagactttaaaaaaaattcgataggcattttcatgtttcagtcctacaatcccacatctctgctgccttcagaatgctacaacttagatgtccagccaacagcttaaagccaatttataaaaatagcatctttcctaattccaaaatttcaccttttgtttgttttgttttgagatgcggtcttgctctgtcgcccaggctggaatgcagtgctgcaaacatgactcactacagcctcaacctcctgggctcaagcaatcctcccacctcagcctcccaagtagctggggaccacaggtgcaagccaccaggtccagctaaccttccccccacctcccccgaccccgctgccacccgccctgagacagagtcttgctctttcacccagactggagtgcagtggtgcaatctcggctcattgcaacctccacctcccaggttcaagcaattctgcctcagcctcctgagtagctggaattataggtgctcgccaaccacacctggctaattttttttgtatttttagtagagatggggtttcagcatgttgtccaggctggtctcgaactcctgacctcatgatccgcccacctcggcctcccaaagtactgggattacaggcgtgagccaccgtgcccggcctaatttttgtattttttgtagagacagtttcaccatgttgcccaggctggtctcaaactcctggggtcaagtgatctgcccgtcttggcttcccaaagtgctgagattacaggtgtaagccaccacgccaagcccaaaatttcaccttttaaatttattccatttattttgtaggtgaatttcatttatttctcagggttaaattttagcgcttttgcctgtgtctatttttggttcacacctccccagcccactgtcctgtattaagtaggccttccttcaagatcacagtaatatctccctaaatggatttcactacgtttggtcctatttttggttcagttatagtttacagataccatcatgttgcttccctgatttaaatattgggggaaaaacttgctttttggattttatctctgatgttctactggattattttagacttttagaacactatgaaatgggtgcttgcttttcacttttcaaaccttttttgcttaaacaaagttcataagcttattgtagtgggaagttcaaagtcacagatctggtacttactcgcctagtgaccttagagacaataaatctatagagcctagtatggggtctggcaggtagtaagcacttttaatgaatggaagtttaatattctgtttgcatccactcgaccataatcaccccaaatccagcttaggtagccttgaattaacccctactccaccttgaagttttttatttgttttttgctgagacagggtctcattctgtcacccaggctggagtatagtggcgcaaacatgactcactgcagcctcctgagtagctgggaacacaggcctgttgccaccatgcctggctaatatatatattatatataatatacatatattacatatatatatataatacatatgtgtttatgtatgtatgtgtgtgtacattatatatatatatatactttttttagaggcagagtcctgctatgttgcccaggctggccttgaactcctgggctcaagcaatcctcgtgtcttgaccttgacctctcaaaatgctgggattacaggtgcgagccactgcatctggtgaattaagccttttttatacactcaactctgaggtattctgttcataccaatatgttcctttgtatcttcttgccatagcaggttgtaacatccttttgtatctcctttctttttttttttttttttttgagacggagtcccgctgtttagcccaggccggattgcagtggcgcaatctcggctcactgcaagctccgcctcccaggttcacgccattctcctgcctcagcctcccgagtagctgggactacaggcgcccgccaccgcgcctggctaattttttgtatttttagtagagacggggtttcaccgtgttagccaagatggtctcgatctcctgaccttgtgatccgcccgcctcggcctcccaaagtgctgggattacaggcgtgagccaccgcgcccagccgtatctcctttcaaatgtcaaataaatacattgtgtatacagtagtaaaggatgttgattggcattgaaagcaactatcaagttcttgttgatttagaagacaaaaagacaattttaaaataacatcctgggccaggctctgtgactcacgcctgtaatctcaacactttgggaggccaaggaaggaggatcacttgaggccaggagtttgagatcagcctgggcaacataatgacaccctgtatccaaaaaattgtggtggcatgcatgggagactgaggtgggaggatcacttgagcccaggagtccaatgttacaatgagctatgattgcgccactacactctgcttaggagacagatggagacttgtctcttaaaaaaataaaaaataacagtatgttcattaaacattaatctcactgattgtgattttttgtttgtttttttgagatggcgtctcgctctgttgcccagggtggagtgcaatggcgtgatcttggctcactgcagcctccacctcctgggttcaagtgattctcctgctttagcctcccaagtagctgtgttatttcagctaattttttcatttttagtggagatggggttttgccatgttggccaggctggtctcgaattcctgacctcatgtggtccacctgcctcggcctcccaaagtgctgggattacaggcattgagccactgtgcctggcctgattatgattttttaaagtccccccccaaattattgtttgtgcaataaatggcaaaaaagaagcattctaagaaaaaagtagtcttaaaagttgatatggtgtcagaattgtaagagagagggtcttggctgaaaagcctttttagaaaaaattgctccctacaaaaaaggccttttctaccttttctcacatttgtttctttttataggaggcatctgagaagaccaaatctcttcaaagttaagctttttgtttttttgggggggacgaagtctcgttctgtcacccaggctggagtgtagtggcatgatctcggctcactgcaacctctgcctcctgggttcaagcaattctcctgcctcagcctcccgagtagctggaaattcaggcgcctgccaccatgcccagctaatttttgtatttttaatagaggcagggtttcactatattggccaggctggtctcgaactcctgacctcatgatccgcctgcctctgcctcccaaagtgttgggattacaggcatgagccaccgcacccagcccaaagttaagcattttttaaccacaaggtgggaggtggaagtatctcgttggaagactaaaggtgtccactaacggtagacccttttttttttttttttgagatggagtttcactgtcgcccagactagactgaagtggcgcgatctcggctcactgcaacctctgccccccaggttcaagtgattctcctgcctcagcctctagagtagctaggattacaggggtccaccaccacacctggctagtttttgtattttcagtagagacggggtttcaccatgttggccaggctggtctcgaactcctgacctcaggtgacccacctgctttggcctcccaaagtgctgggattacaggtgtgagccactgcgcctggccgtttttttttttgttgttgttgttgtttgttcgtttgtttgttttgagacagtctctcactccaggttggagtgcagtggcactatctcagctcactgcaaactctgcctcccaaggtcaaatgattctcctgcctcagcctcccagtagttggaattacaggcgcatgccaccatgcatggctaattttttgtatttttagtagagacggggtttcaccatgctagccttgaactcctgaccttgtgatctgcctgcctcggcctcccaaagtgctgggattacagacatgagccaccatgctagccttgaactcctgacctcgtgatctgcctgcctcggcctcccaaagtgctgggattacagacatgagccaccatgcctggcaaatttttgtattttcagtagagatggggttttgctatgttagccaggctagtctcgaactcctg

SEQ ID NO: 94626 - DNA, 13582 bp, Homo sapiens
  misc_feature (1)...(13582): n = A,T,C or G
atggctgcattattatatgcctaaaaaatacttattcaataaagtaatgaagccaacttacatattctgtaattgctgatgaggtgtgctgatggttgctgataaaaatgaggaaggaaatgcatatgaagaaaggtacagtcatgaaacaatacccctgataaacccagttgttgatcaaatcctcaggctgccacaacaaaataccataggctgggtggcttatggaacagaattttttttttaagacaatctcactctgttgcccaggctggagtgcagtgatgcgatctcagctcactgcatcctctgcctcccaggttcaagcgattctcctgcctctgcctcccaagtagctggaactacaggtgtgcatcaccacacctggctaatttttgtatttttagtagatgcagggtttcaccatgttggccaggctggtcttgaactcccaacctcaggtgatctgcccacctaggcctcccaaagtgctaggattaacagcatgagccactgcatccagctggaacagaaatttatttctcacagttcatgagcctttgaagtccaagattgaggtgtcagctgattcagttcctggtgggagctcccttcctggcttgcagatggctgcggtctctctgtatcttcacatggcacagagagagctctggtgtctcttcctcttcttatgaggactctgatcccatcatgagggccctaccctcatgttctaatctaaccctaattaccacccaaaggacccacctccaaataccatcatattggaggttaagacttcaacatatgaatttgggggagacatgaacattcagtctataacatcagtccaaagttaattctctacctgtgatcattttatagaatgagcagggcagggtttctgctctaggggatgctacccctggtcagagactcgtgtggatttggcagggaggaaactggtcagaattgtatggcctctttcttatcggcatgtttctataatctcttcacatacctgaatgcctgaagagtaagtgaatttcaacacatatgtgctttgtaattctcatcagcttgtcattgctattgattgctctcccgtcaagatgatggagaattttagcttttgcaaacaattatagaatcttctgatcaattacacagtctttgaatggtctgcatatccttcatgcaaaagtcatttcaatttttaattatttttttaaaaaagaaagtgatttgatgcattcattctttaaggtaaaataaaacataagcataagcagttagaattagataaattattgtaaaagtcaattcaataatcaattattacaaaatctaaataactacttgcacatgacggttgggtatgttagcataaccagataattggttattgatagaccgtagggtacataattattcattacctggatgcaatgctgatttctcgctgtgctgatgtatgtcattagctacattttaaagaagaccttattcacttgcttaaggctccatagaaggtagatcttgtttttttaatctctaaacaaaaaagatttcttttacattttttatcatgacattttaaaattgtgtactttcctcatttagaacttcaagctcctgggtttgtaagaccaactgccaagcctcctattgtcaaaagaagtttctgggagtccctcctgcttattccatctccataaacctcaggattcaaactgatgactcaccatattaggtttctggcaatagactgatgtttctcgccattgctctctagagcactgtaattttagccttaagatatcatgataatttctcctacctgcaaattcacactcattaaactgggtgataattatgcaaggactcactaacaaaaggattacagccaggcaacaattccataattaatgtctagtttttgttattgttcttgtttttcctttgagtgatagatttttttttctccgaacccaacaaagatttttcagcttaaataaagatgacattgtcgtgatcattgtaaaattgattcaaaagctagccagtgaaaaaatacattagactaacagaaaagaaagtcgggttttgttttattttacttttgagacagggtctcactctgtcgtctagtctggagtgcagtggcatgatcacggctcattgcaacctcaacttccctggactcaggggatcccaccgcctcagcctcccaagtagctgggactacagatgtgcaccaccatgcctggctaatttttgtattttttgtagggacagggtcttgccgtgttgcccaggctggtctcgaattactggactcaagtgatccacccaacttggtcttctccaaaggtgttggaattacaggtgtgagccactgtgcctggcccagaaagctgaattttagatgtgactgcctgatgtcttattctgtttcaggactaccttaagtctgttctccacaactttttagtctctgtaggccaattgcactaggaaccactctcccatctactattatttataactacaaaacacacagcaaactgtgtgcaagcacatacatgtttattcacctgatgagcttttactttgtgctaactatatggctgacataatttgctgctccgtagaattcaaaaataaaacagtcactttttaaaggatgcataggtataatatgactcagtaaatcacagaagaaatacaatgaccaatacatatttgaaacactgttcacatctaccagtaatcaataaaatataaacaaagatgacaagaaggaactgttacctattaacttagaacagatttttaaacattttattattctgtagcaagtatgaaaaggacttggttcctgtaccacagctactcccaaatcttcctaattaacagaaaaaaaaattctgaggtattgaatcttataggaaatatctggatggtctaaactgatcatagtctcactacccttgctggtacctagtttctgcatatgcatgtaatatggtttggctgtgtctccacccaaatctcaccttgaattataataatccccatgtgtcaagtgcagggccaggtggagacaactgaaccatgggggtggtttccctcatactgttctcatggtagtgaataagtctcatgagctctgacggttttataaatgggagttcccctgcacaagccctcttgcctgccgccatgtaagacttgactttgctcctcatttgccttctgccatgatcgtgaggcctccccagccatgtggaactgtgagtcaattaaacctttttcctttacaaattatccagttttgggtatgtttttattagcagcgtgagaacagactgatacagcatgtgatggaattctgtccatgagacacaaagggaaatctgctagggagagggggtacctagaaagattctcttctttcttagaaagggacccaagacagtaatgaatactctctgctttcctgccttgtttatatacctcttgatccagcaatctaatcctaggtttttatcttgaagaaataactaagaaaatatgcaaaactttacatacaagtctatctagttgcaatcaggctgttctcttgaataggacagacttgaatggagttcatttactataatgaaaaattagaaacagtcataaatgtccaacaatatgaatttggttaagaaattatgagattccataagctactacatattcataaatcatattgtaaatgagtgggaaaatcttcatgacatactgttaagagataaaagtacaaaagcaaaaatttttagaagcatgttacgtgtgtgtgtgtgtgtgtgtgtgtacgtatactcccctagagagtggaataatgagagactcttattttcttttttgagctcatttggacttttcagtttgtagcattaacattttttccctttgcaactgaagggaaaaaatgttatttttaaaaactgaatcacatttgggtattataacagagcacaaaggagaggtggcctaaccctaagtgggagtgggccatttctagaaggtgtgctggagctgagtcctgaagtcagccaggattatctgctggtgaagggaaaagggtgtttcaggcagaggagaaagcatacatggagaatcagctttggagagaatcgaactctaatttttgtccaccacatcttgcagcaccacgtcaaggtcactttatggactttgctgcaccacactttaagtaccaatgcatggataatgattcttaccccttacttacctgcatattttagcatggttcttgtgtccagtgtgccccacaggccagagcctgcagcccctaactctgtgctttccaacactggatgggcaatattgttgcattcaagctatataatttgagagcaattgggaaaagctacccagccccaaaatgtaaatcactaactgaacactgaaaagacatccatagagattcattcttttggggtatataaaaagaaatgtatgtcttcactctccccatgtttctttttaaaaatgttaactgcaagcatggagcacagcgtcaactacattttaggatggctgccaaccaccatttttctggggtattgtccttcccctatcctcatagacactacaagttgattggttcagtcaacatccaataccagctggacctaacccagtcttctcaaaggaatttgaaataaatgaagtgtttttagttgcaatcagcctgtttccctgaatagaagagaagtcaacttggttgttgttcctggaggccttttttccaccatgatgaataagaaggcagagaaagtggtgtgcagcaagatgcagggggcagggagaagcagacctgagatacagtgtatgtattaaggtagactacccactataagaaacagccccaaatctcagtagcttaagacaatacaagtttatttcttcctcatgcaaaaattcgaatctgatgatgctggttagatagctttcctgtgagctctttccaagtggtgactcagggacccaggctccttctatctcatgtctccatcatcttatggcttcaagagccccatgatatcatcccagccaggagaggggaggaagagagagaacgtgaaagatcacaagagacattttgtgatgtatgctggaataggcatacctcacttccttccactatccattagccagaactcaatcacatagttctgtaactgccctggatcaatctggttcaactcctatgtaacaaagttgtgagttattttttagtcccatggaccacccccccaccccaaggttgaaggtcatgtaatctgagcatgcccagatgaaccaagcgtgcaaccacaagtggaaccaaagtgcttgcactgaggggcaaggactgaatcaagaagcagacatcttggaacgtcttggattccttcatggtaggatccagaatctaatcagattgagccctggtgtaactccatggcagaatcccaacagatcatgcctcctggcaccaccgcattgtaagatccaatcagatcacacctcactacactatgcttatgaaacccaacccagccctcagcttggggagtcagatttgagcatttcctcctgtctccttgccagttcactggcaataagcctttttgctgcaaaaatgcagtgcttcagtgtttcgctttccattgcatgcaggcaaacgaacccagtttggtttggtaacagttctatctagatgcaaagaagactagaaaatttaacttcactttgtgcctacaaaggtaaaaagaaccagatatttgtgaaccctggaaggatctgctacatacgggaaagataatgtcttgggttccttcttgatcttgtgctgtatgacacttaattggtcaaatccaatatccttactcaagctagcacaagtgagtttctagtatttatggactaacaaataatcaaaacactttcacagtcggtgccgcatccccagcccgccgccatggccgcctacaaactggtgctgatccggcacggcgagagcgcatggaacctggagaaccrcttcagckgcyggtamgacgccgayctgagcccggcgggccacgaggaggcgaagcgcggcgggcaggcgctacgagatgytggctatgagtttgacatctgcttcacctcagtgcagaagagagcgatccggaccctctggacagtgctagatgccattgatcagatgtggctgccagtggtgaggacttggcgcctcaatgagcggcactatgggggtctaaccggtctcaataaagcagaaactgctgcaaagcatggtgaggcccaggtgaagatctggaggcgctcctatgatgtcccaccacctccgatggagcccgaccatcctttctacagcaacatcagtaaggatcgtaggtatgcagacctcacagaagatcagctaccctcctgtgagagtctgaaggatactattgccagagctctgccttctggaatgaagaaatagttccccagtcaaggaggggaaacgtgtactgattnnnnnnnnnnnnnnnnnnnnnnnnnnnnnnnnnnnnnnnnnnnnnnnnnnnnnnnnnnnnnnnnnnnnnnnnnnnnnnnnnnnnnnnnnnnnnnnnnnnnnnnnnnnnnnnnnnnnnnnnnnnnnnnnnnnnnnnnnnnnnnnnnnnnnnnnnnnnnnnnnnnnnnnnnnnnnnnnnnnnnnnnnnnnnnnnnnnnnnnnnnnnnnnnnnnnnnnnnnnnnnnnnnnnnnnnnnnnnnnnnnnnnnnnnnnnnnnnnnnnnnnnnnnnnnnnnnnnnnnnnnnnnnnnnnnnnnnnnnnnnnnnnnnnnnnnnnnnnnnnnnnnnnnnnnnnnnnnnnnnnnnnnnnnnnnnnnnnnnnnnnnnnnnnnnnnnnnnnnnnnnnnnnnnnnnnnnnnnnnnnnnnnnnnnnnnnnnnnnnnnnnnnnnnnnnnnnnnnnnnnnnnnnnnnnnnnnnnnnnnnnnnnnnnnnnnnnnnnnnnnnnnnnnnnnnnnnngggggctctagtcattccagtggaagacgaatgtaacctgcgtggtgatgtgacaactgtttcctccctgaccccagaggatctggctctaggttgggatcaatcctgaatttcgttatgtgttaatttacttttattaaaaaagtatagtatatataaataatacaaaacaataacccttctggggtttcttgtggcggttgaaatagtcccacatgtggtcatcagaaaataagccattcctcataccaatataggatcagctccttgacctctgaggggcaggagtgcttcctggtgtgtgtattaraatcccttcctgccttgtttcatggcagtgaaatgcctcttggtcctgtccaagtgtatctttcactgatttctgaatcatgttctagttgcttgaccctgccacatgggtccagtgttcatctgagcataactgtactaaatcctttttccatatcagtataataaaggagtgatgtgcaaaaaaaaaaaaaaaaaaacactttcagatgataaaacattatgacaatctcatttaacttttacatcaaacctgtgaggtagatcttactatcattcccattttgctgaaggagaaacagagtcccagagaaatgatgtgaattgtgtaagtcctgcaacagcaagtagagccatggctggaattaaatccttcaaactctaatgctgggctctctttccacttcattgtgtgcaagagccgctgggagagacagaattaaactcctaacctcttagtgtgagtgattttattagattacttacagtctggaggaagagagaatgacagcgtgaagccaccagctctcaggagaaagggtacatagaaatgaaatgaagggtgcaaagaggaaagtccaggcacaccacacacttcatcttcttcacaattttgcagaggttttggttggaactcagaaagaaatccaatcaaagccaaaagagtaggactcctctctctatggagggctgcattttgtgtttgacattggaagacactccagtgtctgacacgaataacttacagaaagccctgaagaaaagcaagacaaatggtgaagaccttgagtcatggcacccagatgaaaggcactgggttgtcagagcctgggtgatgaggacaaggatgaaggagaacagtaaagccacctttgcgcacaataaattatgagataaccctggaacgacagcaaacagctgctcggtttcctcagagctaacagcagccacctctgctgggctttttccaccaccagctcctttgacaaccagcctaacagaattgatgatcaaagctctccagtgtggcagcaaagcctttgccgggggaaaggtctttaaatgttactggagcgagaagggaaagtgccaggtaggaataaccttgacagaataaagtgaacaacaaagtgctggaagcaaactgttaagagggtgtggatacagctcgtgaggtggcggttcccaaatatctttgtggaggttttcactggtccccaacaaaaaaggacaatgtagcaagtttcccttatacctttcacttaaaagactgtcctttattccaagatttcttctttcacagttttgatattaaatctccttttgtgaaaagacgatagaagatggtgttctttttttttcctctctcttatattcatggtgaaataaaatgttggcaacactccatcagtcctcagctttttttttttctttttcactggtccatgaaatttaaaagtctggtacacatgcaaatgcccagaactctttaagaatcattcacaaagaaagaaaaaaagaagacaactaagaaaacacccaaatatattaaaaggataaaccacacaaatttcaaggacgaatcaatgctcagaagtgaagtaaatagcaatatctttgaggaaaatcatagtaggaaacaaaaaaggattagtcagtttctatcagccttaggaatctgaactgtctgcctttcaaagacatgtggaaaaagggaatggatggctcaactaagccttgaccattactcacaattatctctaaaacaagaaacacagctgacatgaaaaactaggagctattaaacttttgagaatggattacaaaatactagccaggagccagctgcaaagattttgacaacagaacagctcccaatgttcacaagagtactcagaaaaactaacaatagcagctgttttgcaaaaagtgcaaaagaaggttgaaagaatgagaacaacaaacagattgtgaaaattcrccacgttaactcttggaatagaagctgtaaatgtttcgatacaaaggggactcctctacaattcatctgcttatcctttaggaccagagtacatgacaaaatgacagtgttcaggaaagaaaaaggcttggacaaaagtgcacagaaatggggtgaaagaggaaggcatgtgtgaagataggtttcccttgaatttcagaactcatgaacccatgtaattgcaaattgcattcctgactagcaataacgtaaagaaacacagctgagatataaatggaaaaaaaaatgaaatgtaaagatattcacatttgctgaaaagtaatagcattcattctcttgccttatgtttataactttacgatagaaaggaaaatgatggggaatattttggggaaggatctagaatttattaaacatctattgaggaccaggcacagtgcttgaaactcatagcctctctattagtattccataaacttctaacaacaacattctaaggtgagtattatgaccccagtttccaggtgagaacactgaggatcataaataagatgcttattcagagggttgtagctatcaagtgtcagagtcaagtaagcattttcaccactcttctcaatatccagttatcctctctgccaagatgcagaatgaatgattatagaaactgagggattctctgagaatccttcctcccaaggttgccccctacatcacctgaggtgccaattccaaactcctaggtctgctgttccttgtgctgaacgctcttatgagctcacattaaaattgatttactttatgtcctctcaggtaagtccagaaagtcacttctgagtgtcaaagtagaagagagtttatctgatcaaataatacgtagttatgtactaatggaagaggacaaaagaacaattctccttccaggtagagataacggcccaatctttattaacaacctggggttggggggttgtagccccactcccttccaggacctgactgcaccacaaccctggtgtactgatcactccccagtgcacattgccaactatagaagctgatgttcccaggggcatcgaagcccaaagagaaaaaacaaaacaaaaacccacacacgtgaagagcatcactataaaaggaaataggacaaaaagaaaagccacagaatgaatgtagtaggtaaataacaaatgctaaataagcataaaaatcttcaaacaaataagagacaatattggcaaaatgaaataagaactaacagaataaggaagaaccaagtggaaaacctgattacaaaagacatgatagttgaaataaaataactcagtaattaagataaatatctcaaggaatacacctgagaaacaaattactgagctgggagtctgccatatcatacccggaacaataaaataataggccgagcacggcggctcacgcctgtaatcccagcactttgggagaccgagtcgggtggatcacgaggtcaggaattcgagaccagcctgaccaacatggtgaaaccccgtcactactaaaaatacaaaaaattatccgggcatggcggcgtgcacctgtagtcccagctactcgggaggctgaggcaggagaattgcttgaacccaggaggcggaggttgcagtgagccgagattgcgccactgcactccagcctaggtgacagagtgagactacatctcaaaaaagaaacaaagaaaaaaggaaagaaaaagagactaacttcgataaaacataatgacatgagcatctctccattaaataaagctgggagaactatgggaagaaacagaaggtacaattgttgaatatttcacatattattttcagaaaccaatagatcattggactgattcttgatatcagagttaaaaaaaaaaagaaactgatagatcaagcagataaaaacaaaaacaaatgtatggatcatttgaaaaaacaatgaataaagttaaatataaaccaattatttccaagcaaatatagaattttctcattttaaaaaccacaaagtaaactttaataaatataacattctttccaaccaaatatagaacccttataaaaattaatcccaaaataaaatttaataattttaataaatttaataattttattttcgagttaacatccaatcatgttctaataaaattaaaagtcattgacaaaaggatattaaaattattccttatgtctgaaaatcaaaatatattctactaaagtaactcttgggttagagcagaaattcagcagcattaaatgtgcttagaattgaaccacattgaacatgctacatgaaagaaagtacaacagagtgaaatcctgtctcaaaaaaaaaaagacagtatgaaacacaattaaagcagaaccaaaacaatagtttatagctttaaatacatttgttagaaaacaagaaatcaaaataaaataagctaaactctgaatttgtgaaactggggaaaaagtctaatccatctggtgaaatatgaaggaaagaaataataaagatagctccagaaaataaataaaaaatactaataaaccaaaaattgattatttggaaagatgaacaaaatagacataacactattaatagtaagactcatcaagtaagaaacagaatgatttgtgggattttaccattgaatgtgtattttaggtacattttagaaggatgcatacattattcaaggatctagagcaaatacactaaaatgggtgtctatagatcatatagaatgggagtgggatcagtgatggaagtaaaaaatgtaagtaaagagaagggcctcacatggatgaaggaggacagaatcccatggcatcagatacaataggcaaaggaagggacattcagtattctgtgtgagcacaattttgggaataaaagtaaagttaaatctttctttactctttacaattttttttttcaagtctgttaaaaagtttgatgctaaaaatgaaaccaatagctaagtaaacagattatcttatcaatttgggcaaggattttgaaagcacaaagataataaaagaaataaaaaaggagaaaaatgactttaaaaaggaaatctttaaaaaaatctttttgtctatcaaaaagtcacaaaacatgagatgtaaaaaagcaataggaaagaatatttgcaacaaaaactacaaaagaagaaaatacagtcaatacatgggtttatgcaaataaacaagaaaacacaaaaatattaatattattaaaagttgaacaagagaaaaaagtttttaacagcccacagagaaaataaaactggttaataaacatgaaaaaatattcaatttcagtagtagtataacaaatgcaatcaaaactgaaatttcccctctaccaaattagcaagccagcactcccatacactcctcttgggaatataaactggttctacttcctggaaagcaatttcatactacttgtcaagagacttctgactcagtaattcctcatctaagcatctatccttggagaaaaacctacgcattcatcaaaataagaatgttaaatttgatacgttcatactgtgatgaatagtcgacctccatgagaacatagtctctgaatccccaggacctgctacattagtaaggatcaacaagtatttgttaactgactctggaattctatgtggtagctaaaaaataaaaaggagttccaattatgacttagaaagatatcctagacctgttaaatgaagaaaacaaggtgaaaaagaggatgtacaagctgatcccattgatgtaaaactaaaaccagaaccaaaacaaacaacaaatataaaaccttctcccttgtattagcctgttctcacactgctgtaaagaactgccaacactgagtaatgtataaagaacagagctttaattaactcacagttcttcatggctggggaggccacaggaaacttataatcatggcagaaggtgaaggagaagcagacaccttcttcacaaggcagcaggagagagagagaagcccaggggaaactgccatttataaaaccatcagatctcatgagaactccctcactatcatgagaacagcatgggggaaactacccccatgatctagtcacctcccactaggaccctccctcaacacctgggtatttgggtggggacagaaaaacaaaccatatcatccctgttcctcttcatctctctgtgta

SEQ ID NO: 94627 - DNA, 31297 bp, Homo sapiens
gtcaacactgcagtgagccgtgatcatgccactgcactctagcctagatgatagagtaagactctgtctcaaaaaataaataacatatatttaagaaattaagaattttgctttggtgcataatcaggaaaaaagcaataaatggttctgaggaccaagtcactctggtgggattggggattggagctcagatcccaaaggatgaggtagctgactgcataatgcagtccccagggcctggtgccagccttgctggctctcagcagccacttgaatgggaccacaggatttgaggggcctgagagggagaataatgcctcagtgcacaggcccagggccatttccagtagctacctgtgtagggactttcactacttgggggaaatgagtcaggtcttgtgaagttggtttcagagctggccagagtttaggaatgattcggccctaataggggattagaaggaacttaaatatgttccttaaatgtgcgctcattacaatgtcactagaaggtccacgcataaagtcaagatcttgttcaggcccccttatcgccctgcttcgtatatgggtcctctgggaacctgaactctgttcttcattctcattcagacagcctagcctacagtaagcaggaagtgccagcaaataagtcactggggtagctccgggacaaactcagagacttggacagcaggcatttatttcttcatctcttctacctggccacattcctcttagggtctagaaacccctgccaaatgctaaaacgttcagtgaggggtgctgagaacttaacctttccctccctcctgcctagttgtccagaaagggatgctcccttctccttcctagacagccattctcactttctagctcttcatctgtttcagcctcctctgtcgccacacaaggccaaccctgcacacacacataggtatgcattctgcctgttctacattagcccctctggactgtgaaccttgaaggcagagaacaaggctggtcctttttttttttttaaatttttgtgatgaaatctcactctgtcactcagactggagtgcagtgaacaatcttggctcattgcaacctgcacctcctgggttcaagcacttctcctgagtagctgggattacaggtgcctgccatcacacccggctaatttttgtattttttgtttgtttgttttgatttttgtttttccgtcggatttatttcctcacattacagcatacttttcatatgagcctacacatatcagatggtaactctggaatgggtgagtctgtgacactgacccagcacagctgtgagggtgatgacaggcaggttagcaggtgcgcacagaggggctttcttctaaattggaggtcaggttagatgattcagctcygcagagctcattcagtgctccgtcttctggtggcttcccttgatttctaataaaagctgcagatggagtcactcagttccacatggctggggaagcctcagcaaacttacaatcaaggtggaaggcacctcttcacagggtggcaggaaagagaatgagtgcctaatttttctatttttagtagagatggggttccaccatgttggccagtctcgtctcaaactcctaacctcaagtgatcttcccaccttggctcccaaagtgctgggattgcaggtgtgagccaccgtgcccggccaaggctggtccatttttgtgcccagtgaaaggactaggacatagtatatgctaagtaaatgttagctaaatgtatgatccatgatcccccccacaattatcccattattttttttctttttctttttcttttttttttgagacaagagtctcgctctgtcacccaggctggagtgcagtggcatgatcttgacccactgcaaccttcaccatccaagttcaagggattctcatgcctcagcctccaaagtagctgagattacaggcgtgcaccaccatgcccagttaattttttgtatttttactagagatggggtttcaccatgttggccaggcagatcttaaactcctaatctcaagtgatccacccgtcttggcctcccaaagtgctgggattacaagcttgagccaccgcgcccagcttccctccatcattttctccactttcatatctcctgtctcttccactggacccttccccgctgcttagcacgtggtcatgctcgcatttcccacatagtgaaaaactctccctccatctgcatcaagtcactattaacccataacttttcttcctcttactttttttttttttttttgagacagggtctcactcagttgcctaggctttgtagtggtgggtgcgatcacagctcactgcagccttggcctcccaggctcaggtgatcctcccacctcagcttcccaagtagctgagaacacaggtgcatgctaccatacccagctaatttttgtattttttgtagagatgggatttcaccatgttgcccaggctgatcttgagaacccctgggttcaagtgatctgcctgccttggcctcccaaagtgctgggattacaggcatgagccactgtccctggcctttactgtatccttgagaagtccttcctctgattctccatgtcttcatctcctgttcattcctgaattcaggtcatctggctcaggattaaccattccactgaaggagctctccacattggtcaccaatgatcttcatgtccaccaaatccaaaagtttctgctgtggatatcagacaatatgaatataaagactatggtaagtagtggatgctcaataaagtggttgttcttatattcttatttgctcacttctgtttttttgttttttaaaaattattatttatttttgagatggagtcttgctctgtcgcccagactggagtgcagtggcaccatctcggctcactgcaacctctgcctcccaggttcaagcaattctcctgcctcagcctctcaagtagctgggattacaggcatctgccaccatgcccagctaatttttgtatttttagtattgatgggatttcaccatgttggccaggctggcctcgaactcctgacctcaggtgattggcccgcctcggtctcccaaagtcctgggattacgggtgtgagccaccacacctggcctgtttgtttttagacagggtccttggtaaaaagaatttgaggggaaaaaaaaaaagagacaaggttttgctctgttgtctaggctggagtagaatggcacaatcatgacacactacagcctcgaagacctgggctccagcaatcctcccacttcagtctcctaaacacctgggactataggtgtgcaccaccgtgcccagctaatttttatattttttgtagagatgaggtttcactatattgcccaggctggtcttgaactactaggctcaagtgatcctcccttcttagtcttccacagtgccgggattacagccatgagctactgtgcccggcctgtaggttcttcttttacgtatttttttttttttgagacggagacttgctctgtcacccaggctggagtgtagtggtgcggctcactgcaacctctgcctcctgggttcaggcgattctcctccctcaacctcctgagtagctgggactgcaggcgcgtgccaccatgcccagctaatttttgtatttttagtaaagacggggtttcaccatattggccaggctggtctcgaactcttgacctcgtgatctgcccgccttgtgctgggattacaggcgtgagctactgcgcccggcccctttttttttgagacagagttttgctcttgctgcccaggctagagtgcaatggcacaatcttgccaaacgcaacctccgcctcctgggttcaagtgattcttctgcctcagcctcctgagtagctgggattacagggatgtgccacctcacctggctaattttgtatttttagtagagatgggggttctccatgttggtcaggctggtctcgaactcctcacctcaggtgatctgcctacctcggcctcccaaagtgctgggattacaggcgtgagccaccatgcctggcctattttatttttttttgaatacaggctggagtgcagtggcgcgatctcagctcactgcaacctccgcctccctggttcaagtgattctgttgcctcaggctcccaagtagctgggattacaggctcgcatcaatacatccagctaatttttttttttttttttttttttgaggggcagtctcgctttgtcaagaggctggagtgcagtggctcgatctcggctcactgaaacctccgcctcccgggttcaagcgattctcctgcctcagcgtcctgagtatctgggactacaggtgcgcgccacgacgcctagctgaatttttttttttttttttttttttttgagatggagtttcactcttgttgcccaggctggagcgcaatggcgcaatctcagctcaccacaacctccgcctcccaggttcaagcaattctcctgcctcagcctcccgagtagctgggattacaggcatgtgccaccacgcccggctaattttgtatttttaatagagacggggattctccatgttggtcaggctggtctctaactcctgacctcaggtgatccgcctgcctcggcctcccagagtgctggaattacaggcgtgagccaccgcacccggccgagtctgattgtttttatgaggatggcctgatacattagacatttggtccaccaggacatcacttatgttggggagacagtgggggataacgggggtggggaaatgggaagagtggctctcagggagtaaaggtgtggggaaaagcagagccaaaccgagataaccctgtgtcttgcccatccctgccaaggaaaacacatacatgcaagacacctctccactcaaacagcacagactatttcaaatcgcagatgtgtcatttaattaatacctgtgtgactttgggaaaattataaatagccttaaccttgctgagtctgtccaatctgtaaaatggattatgaatactttcctcacaggcttatggtgtgctggtaatatctgtatcttcctctggatggcagttacattgcaaaaaataatttaaaaaaaagaactgtatacatttaagatttatacattttctttcttcctggatgtagaataggaaaaaaagaaaaagaaaaaaaaaaagactggtgtattttctgtatatatgctatactacgatttttaaaaaggcttgtacgaaataaaagaatattccttttcggccaggcgcagtggctcactcctgtaatcccagcactttgggagtccagggcgggtggatcacgaggtcaggagttcaagaccagcctggccaagatggcgaaaccccgtctctactaaaaaatacaaaaaaattagccaggcgtggtatcgggcgcctgtaatcccagctactcgggaggctgaggcagagaattgcttgaaccagggaggcggaggttgcagtgagccaagatcgcgccactgcactccagcctgggcgagagcgagattccgtctcaaaaaaaaaaaaaaaaaaggaatattccttttccaggattattatgaagattcaataaaaccatgtttattaagtgttaagcacagtgcctggcacataacgtgctgggcggggtctatggtccagacagggggaccaggcactttccagcgcctggatctgcagacgcgaggtcttctgtattctggccaatcttggtgttgcagctgctctctgggcctcagtttgcttgaactaaatgtaacggggccaacttaggtgaactttgggaatccagccaacctgactttagggagagtatggagccacggatggcattgtgaatccggagggccgacaccagaagaacctgcaacgtggcatctgctaccttacttcccccggaaaagcgcctgcggcggcgcctaggcgcgcggtgcaatgtgggccagcaaaaggcgaggctggccccgccccttgcaccgcccacgtggccagcgccacctgcctcattgtgcccaggagttctccaaacccgcgctgcggagtgagtgaccaagttccggccagttcgacctcgaggatccagaggtggagacggtactacctcccagctctgttttccatccccttcaggtccttcctcgggaggcggcgaaggcggtccaccctgcgcgtgatccttyatgcccggcccctgcccctccctccgggtggaacttccccctcaccgcyagacttaagctgaggatcgttggatctctggcggggtgcagaactgagcccaggccacagtaccctattcacgctctgtgcttgtgccaaggtgagtttctcttgctgctggcctatctttctcccggaggagatggcctcgattctttactactgaaatgtaagcccctggggttgagtggagagcgcagagcactggaggggacgagacttggtttcggatttgagctcttctttttctctgtatgatctcttgctaacttcccagtttctctgaacctgtttcctcagcaataaaatgaggtcctacattagaactgtagcaagaattgagataaagctttgaaggcgcacagcgcatactaggtgatctgcaagttttaattgccatctttttgtttgctcacctatgtgctttttccagctgctccggctttcttatgcaggtgcagggatagttctcagaagtggrgagaagtggggataattctcttacttagacacctgctttgggtctgagaaagtctgacatgttattctgttgccccagaactctgttaaagtaagacacagatctgaaccttcactggatgaggctactgttaattaactcttccccttcagatcgttcatactcagggctgcaggcctgttacttttccaagatctgtttccttatctttaatacaggagcaatctcagtatgattctatctggtccactgggattttttgccgagtatagtaaagtgctttgatattctccaagaggattcttttcaggttttccaacaggtaaaggaagaaggtgacagaggcagcgacttcctcaaatgtccttccagctggccaaactcaacctgtcaagatctctcccccataagctgtgtgtgtgtggtgtgtgtattgtgtacattgtatgtatgtatgtatgtatgtatgtatgtatgtatgtatgggacaggtactctaggagtgaggggttcaggcagatgacaggctcagacctcaaggagtagccaggtttgtgggggaaatttatatataaacagaaaaatgtagtgatgtgcacatgctatcagtacatggaagtagccatcyatttatttatttatttattttctttttagagatggatgggggtctctcggtcttttgcccatgctggagtgtagtggtggaatccttgctcagtgcagcctcaaacttctgggctcaaataatcctgccacctcagcctttggactataaamtacatgccactgtgcccagttaatytttaaaataaaaaaaaaaaaattccccctagcaagcagactcagaaagaaaaaaacaaatttttgtagagacagtgtttccttttgttgcccaggtttcaagtgatcctcccgcctcagcctgcccaggtgctgagattacatgtatgagccactgcacctggaaaggagccagaaatgtgaagtgctagctgaaggatgagcagcagctagccaggcaaaggtagggtttggggaaggaaagtgcacacacctagagtcaggtaagtgatgtgaccctgttgagtgttcaaagtctggaatacagtctgacatgaggaggtggtgaaatgagaaagatagaagccaggttttgagaagcctggactttatcctgaatataggggagaattgctggaagggtttgagactgggagtcacatggttggatctggtgatggactgcgggaagagggaccactctggaagccaagatctgtggtttaagtaaagagtgatggtcagctgggcacagtggctcatgcctgtaatcccagcactttgggaggccaaggtgggtggatcacctgaggtcaggagttcgagaccagcctggccaacatggtgaaaccctctccgtactaaaaatacaaaaagtagctgggtgtggtggcacacacctataatcccagctactggggaggctgaggcaggagaatcacttgaacacgggaagcagagattgcagtgagccgagatcatgccactgcattccagcctgggcaacagagtgagactctgtctcaaaaaaaaatttaaaaaggctgggcacagtggcttatgcctataataccagcacttcgggaggctgaggcgggcagatcacgaggtcaagagatggagaccatcctggccaacatggtgaaaccccgtctctactaaaaatacaaaaattagctgggtgtggtggcatgcgcctgtagtcccaactactggggaggctgaggcaggagaatcggttgaacctggaaggcgaaggttgtagtgagccgagatcacaccactgtactccagcctggcgacagagcgagactctgtctcaaaaaaaaaaagagtggtggtggtcagagatggggcagtggcagtggaggtagatatggatggactagagaaagatttaggaatatatattttaaaattcttttcacatacatcaagaagtacaggaagcattattgcaatcttaggtcttaggttacatattagagcattctctttttctgtagctattaagtattaacaagatttaaaacccagctaaactgacaaaatctggccaacattacatatgtaaggtgattttccaagctggcttttctagaagtataggagaggccgggtgtggtggctcatgcctgtaatcccagcactttgggaggctgaggtgggcggatcacgaggtcaggagatcgagaccatcctggttaacatggtgaaaccctgtctctactaaaaaatacaaaaaaattagctgggcatggtagcgggcacctgtagtcccagctactcgggaggctgaggcaggagaatggcatgaacccgggaggcggagcttgcagtgagccgagatcacgccactgccctccagcctgggtgacagagcgagactccgtctcaaaaaaaaaaagaagtataggagaaagccaggtgtggtggctcacacctgtaatcccagcactttaggaggccaaggtgggagggtcacttgaggctagaagtttgagrgggcaacacagtgagaccctatctctacaaaagaaaaataaggccaggcatagtggctcacacttataatcccagcactttgggaggctgaggcagaaggaccacttgagcccaggagtttcagaccagcctgggcaacaaggagaaaccctgtctctacgaaaaacacaaaaaatgagctggacatcgtggcccatgcttctagtcccagctacctgggaggctgaatggaaaggatagcttgagcttgggaggtggagtttgcagtgagctgagatcacaccactgccctccagccyggacgttagagcgagactctgtctcaataaataagtaartaaataagctgggtgtggtgacatgtgcctgtagtcccagctactcgggattgctccagtccaggagttcgaagctgcaatgagccatgaatgggccactgcactccagcctgggcaacagagtgagaccctgtctcaaaaagaaaagtacaggagaaaatactctcctcaccaactacttatcaaaaccataatctgataatactcataaatgcctgcaaggaactacaaatactttctttagatggcttttatttatttattttttagacagggtttcagtctgtggcccaarctggagtgcagtggtgtgatttcagctcattgcaacctctgccccccaggctcaagggatcctcctgcctcagccccctgagtagctaggaccatagagacacatcactatgcctggctaattttcatattttttgtagagaytaagttttgccatgtcccccaggctggtctcgaactcctggactcaagcaatctgcttgcctcagcctcccaaagtgctgrgattaacaggcatgagccaccrcacgcaaccagatgtttttttttaaggcccaaatggattatactatcaacatgttgtctggtttgctttaacacttgttatccagggctttggtcttttggtgagatagagtacaaagtcaacactctatccacaagttgygcatctgcggattcaacctagaatcaaaaatacttgggaacaaaaaccaactttaaaaattcaaataaaaaaatacagtataggccgggcgtggtagctcacgcctgtaatcccagcattttgggaggccaaggtgggtggatcacctgaggtcgggagttcgagaccagcctgaccaacatggagaaaccctgtctctactaaaaatacaaaattagccaggcgtggtggcgcatgcctgtaatcccagctactcgggagtctgaggcaggagaatcacttgaacccaggaggcggaggttgcggtgagccgacattgcgccgttgcattccagcctgggcaacaagagtgaaactgtgtctaaaaaaaaaaaaaattataacacctatttacctagcatttagcatttatattgtattaggaattataagtatttagagktgattaaaatatacaggaagatgtacttaggtttatgcaaatactatgccattttatataagggactggagcatcccaggattttggtatctgaaggggtcctggaaccaatctcctgtggataccacgggatgactatacagaaagaagagcatgggttaggccctgtgcaaggtgctttagatatagtatctcttgaaaatatcagaactgagattcaaacccaggtctgcgtagccccacagcctaaactgtttcctctgtactctactgctggatttgatgagtacagttttggacatggcgaatctcagatgcctatacatactastggagaggtccagagggcgttgaatatacagaagtggggtgagaagaatcaaggcctaaggygataaccgaagacatgaactcaactagggaatgagaagattgaggagaaaaccctgaagggacctttcctttgcctcccacaccagcatatgtgggagccagaggasaggcccatgcagctaggaaacactcatgtagatattgtttcctttttttcctgtgtcttctacttccctgcagccaggcagcaactgtagagccctttgagaaagaaagaattcaacagagggaaggaacctaggcattgaattggaaataataaaacctgattcctgataataccctcctccccactcaacccacacatctctcttttacacttgaatataacatgaaggtttccgccgggcgcggcggctcgcgcctgtaatcccagcacattgggccgaggtgggtggattgcttgaggtcaggagtttgagacaagcctacccaacatggtgaaaccccgtctctactaaaaatacaaaaaattagccaggtgtggtggtgggcgcctgtaatcccagctactctggagtctgaggcaagagaatcacttgaacctgggaagtggaggttgcagtgagccaagatcgtgccactgtactccagcctgggtgacggagcaagactccgtcttaaaagaaaaaaaggatagccgggcgcagtggctcacgcctgtaatcccagcactttgggaggccgaggtgggtggatcacaaggtcaggagttcgagaccagcctggccaatacagtgaaaccccgtctgtactaaaaatacaaaaattagccgagcgtggtggcgggcgcctgtagtcccagctactcrggaggctgaggcaggagaatcgcttgaacctgggaggtggaggttgtggtgagccaagattgcgtcattgccctccagcctgggcaagaagagtgaaactccatctcaaacaaaataaataaataaagtaaaagataggctgggcacagtgactcatgcctgtaatcccagcactttgaaaagctgagactggtggatcacctgaggtcaggagttcaagaccagcctggccaacatggtgaaaccctgtctctactaataatacaaaaattagctgggcgtggtggcacatgcctgtaatcccagctactggggaggctgaggcaggagaatcgcttgaacccaggaggtggaggttgcagtgagccaagatcgcgccattgcaccccagcctgggtgacaagaatgaaactctatctcaaaaaaataaaaataaaaaagataacatgagggtttctgaatgctgccaaaggtccagataggcagttcctgacaagctcagagtctggaatctgttcacgcacagctaggctggaargcagttgtatcaagcagaagatgaggaagtcaagagctggccgaggatgattttctgtcctagagaaaaacatctatgtggcaccttcattcttccctagggagctcttgttctttgcagatctcctscatctttcatccctgttccccaagcctcagccttttcggtgttcagtttcaccagcaaaagaaagggagaagcaagattcaggtttcttcttccttttccccttaagccagggtgttgttcaagctctcaccccaggtgtaatttcagagccttctcatgcrtgctgggtaatctgcgagaggccaacaggtcattgggcattaagcccaggaaacctgccttagaccctggtggcagcaggccaccwggttcctcttgtcaagtccagacttgcttgcttgatcccttggaaatttgattataaagagcattgccctggtagcttgtggtttgacactcagattgaagttttgattttgttttagcagaaaagagtggtttccaaaaccaacttaaactagactataaaattcttcctgggtcagaagtattaggaaagacagtgttggtgtactggctttactcacaacttgtcttttttttttttttttttttttttttgagatggagcctcactctgtatcccaggctggagtgcagtggcatgatctcagctcactgcaacctctgcctcctgggttcaagcgattctcctgcctcagccacccgagtagctgggattaaggtgtgcaccaccatgtccagctaatttttgtatttttagtagagagggggtttcgccwtgttggccaggctggtctcgaactcctgacctcaagtcttaagtgatctgcctgcctcggcctcccaaagtgctggggttacagacgttagccactgtacccagcctcaacttgtcttattattattattattttttgagacagggtctcgctytgttacccagactggagtgcagtggcactatatcagctcactgcaacctccgcctcccgggttcaggtgattctcatgtcttggcctcccaagtagctgagattacaggcatgtgccaccacgcccagctaatttttttttttttttttttttgagatggagtcttgctctgtcacccaagccggagtgcagtggctcaatctcggctcactgcaacctccacctcccgagttcaagcgattcctcctgtctcagccttctgagtatctgggaccacaggcatgtgccaccatgcccggctaatttttgtatttttaggagagacggggtttcaccatgttggtcaggctggtctcgaactcctgacctcgtgatctgccctcctcggcctcccaaagtgctgggattacaggtgtaagccaccaaacccggcctaatttttgtattttcagtaaagatggggtttcgccatgttggccaggctggtaataccctgacctcaggtgatccgtcgcatcagccttccagagtgctaggattacaggygtgagccaccactcctggccacarcttgtcttattacttgctctrtcctacatccttttagaacctggaaactaagattatatttataaagatattgttggcaattaaatcaatcccaagagtgatattcatggtactgatgagatcaagggaaaaggttgtatctacctcattggctcttggtgtgaacattctctctccttttctttcacttgaatarctcctgttcagttattctttaggacttgactcaggaagagattcctccaagaagccatcctagcaaggttacccttttcttgccacccttgtgcagctcttgtgcagaatttgatcaaagctcttatcacagtgtactgatatcacctgttcccattacaagaccataaactgaaggaaggcagtttaaatatttaaatacatttttctcttgggtttagcacaagagttggaacattcaatttactgacaaaacgagtattcttgggccatttggtgacctcttatttgcatagctttccagagggggaggctccagttacctgctttgtttggttggaaatttacttgtatctgtaattagttacttttctgctgcactgaagtcatgtgtatagtttcctttcctggaaagagttcttccccttaactcttgggaattcttaaaaaccagtgtcaatatttctttgtccttgcccttttctgtagtacatcatacttgtgtctaccatgagtatctttttataggtctgtgtttatttgccttttttccattagctcctccttagatccttggttttgccacttcttttctcttttcttttcttttttttttttttttttttttttttgagacggagtctccctctgtcacccaggctggagtgcagtggcatgatctcagctcactgcaacctccgcctcccgggttcaagcaattctcctgcctcagcctcccmagtaagtagctgggattataggcacccgccaccatgcccggctaatttttctatttttagtagagacggggtttcgctatgttgaccagggctggtctcgatctcttgaccttgtgatccgcccacctcaacctcccaaagtgctgggattacaggcgtgagccactgtgcccagccagttttgccacttcttagctgttgatttggagcaaataacttcacttttttttttttttgagatggagtctggctgtgtcgcccaggctggagtgcagtggcgcaatcttggctcactgcaacctccgcctcccgggttcaaacgattctcccgcctcagcctccatagctgggactacaggtgcatgccaccacgcctagctaatttttgtattttttggtagaaatggggtttcactctgttggccaggctggtctctaacttttgacctcaagtgatttgcytgccttggccttcctatgtgcttgtattacaggtgtgaggcacagcgcccggtctaacttcacttctttgagcctattttctcaactaaaaaattaaagatctggatatggtggctcatacctgtaatcccagcaactcagggtgctgaagtggctggatagmttgaggtcagaagttcaagaccagcctgggcaacctagccagaaccatctctaaaaaagtttaaaaacatccaggtgtgctggcacaggcctgtagtcccagctacttggaagggtgaggcaggaatatcacttgagcttaggagttcaaggctgcagtgagccatgatcacaccactgttctccaacctaggagacagaaccagaccctgagtctaaaaaagagttccttttttaggactccctttacctcccttgcaggmgcccactcgggcctaccagcatggctgaccagacctctgtgaaaggtacttggagaatctctgcagttctttttttttttttttttttgagacaaagtctcgctctgttgcccaggctggagtgcagtggtgcaatctaagctcactgcaacctccgcctcctgggttcaagtgattctcctgcctcagcctcccaggtagctgggactacaggcacccgccaccacgcctggctaattttttgtatttttagtagagatggtctttcactgagttagccaggatggtctcgatctcctgacctcgtgatccacccgcctcggcctcccaaagtgctgggattacaggcgtgagccaccgtgcctggccgagaatctctgtagttctgacaacctcctgggaacattyatttcattctcagagaagtggccccttcctgggcctattcagttacctggtctctctctcataatggcctttgcctgccttacactggcttgagaccttatttagtcaagactgggtgcttctstgtggccaccctgcttttgtttttagatagtgcagttctttaacagagatctttagcctgccacagagaagggcagccaggctggtggtctggttagtgtttgtccaggagctactggccatggttggttttgggcaccctgtctctgctgcctttgctcacaggcacatatataaccacgtgtttgtcctacacatctgtcccctcttccccaccccttcctggcccatgctttgtagtagtgagacagagtcttactctgtcacccaggctggagtgcagtggcgcaatctcagctaactgcaacctccacctcccaggttcaagtgattcttgtgcctcagccccccgagcagctgggactacaggtgcgcgccaccatgcctagataatttttgtatttttagtagagatggggttttaccatgttgacccaactggtcttgaactcttgacctcaggtgatctgcccgcctcagcctcccaaagtgctgggattacaggygtgagccactgcacttggcgctttgcagtattcttgacagtggaaatctgagacctgaacaacagcactaaccccaacaccattctcttcccatctgtgtttcagggggcaatggcggcttyctgtgttctactgcacactgggcagaagatgcctctgattggtctgggtacctggaagagtgagcctggtcaggtgagggatgggggaagaaaaaagaaacttgttgagcctctgcctgcattttcctagcagccccacccccatactccccttccagcggggatgagccagtgggaagagataagagaagacaccaattatacatcctgggcttccccagctgactcagagagtgggctgaggggcccagcagggctgggggcataggaaggacatctttctctaactggatctgcactgagtgctgtggcaaacatggggcccctctgtgcccatccctatgctatgacccctaatatggcagttatcaccctgtgctgtgatcatgtctcctctcccacactgggttctttgagggctcagcctctccctactgctcagtccagaattaggcacatagcaggtgtcaaggtttgaagaataactaggtgaattgtatattgtatagaccaaaggtcagcaaatttttttttttttttttttttttttactcgagacagggtctcgctctgttgcccaggctggagtgcagtggcacaatcttggctcacggcagccttgacctcctgggctcaagtgaccctcccacctcagcctcctgagtagctgggaccacaggcacacactaacacacgggcccagcaaacttttttttttttttgaaaccgagtctcactctgttccccaggctggagtgcagtggcgtgatcttggctcactgcaacctctgcctcatgggttcaagtgattctcctgcctcagcctcccgagtagctggggctacaggcatgagccaccacacttggctaatttttgtatttttagtagagacagggttttaccatgttggcaaggctggtcttgaactcctgacctcaggagatccacctgccttggcctcccaaagtgctgggattacagatgtgagccaccttgcccggccacaaactattttttaaagaacaagatagggccaagtgtggtggctcatacctgtaatcccagcactttgggacgccaaggcaggaagattgcttgagcccaggaatttgagaccagactgggcaacacagtgagacccccgtctctacaaaaaattaaaaaaattcgaatgcgcctgtggtcccagctacttgagagactgagttagggggattgctggagccctggaagtcgaggctgcagtgacctatgatcatgccactgcactccgcctggacagagcgagaccatcttaaaaaaaaaaaaggtaggctggacactgtggctcacgcctataatcccagcactttgggaggccaaggcaggtggatcacaaggtcaggagttcgagaccagcttggccaacgtggtgaaaccccgtctctactaaaaatacaaaaattagccaggcgtggtggcacacacctgtaatcccagctacttgggaggctgaggcattagaattgcttgaacctgggaggcagaggttgcagtgagccaaaattacgccactgcactccagcctaggcaacagagcaagactccgtctagggggaaaaattaaggaaaaaaagttaaaaaacaattagattctattggacaagttacagatggaggtgattatacactcatgtgaccttttaatatgtaaccacttaagctgggtgtggtggctcatgcctgtaatcccagcactttgggaggctgaggcaggcggatcacctgaggttgggagttcgagaccagcctgaccaacacggagaaacctcatctctactaaaaatgcaaaattagccaggcgtggtggtgcatgcctgtaatcccagctactcaggagtctgaggcaggagaatcacttgaatccgggaggcggaggttgcagtgagccgagatcgtgccattgcactccagcctgggcaacaagagcaaaactgcgtcccaagaaaaataataataaaataaataagtaaccacttaaaaatataaatgtagttcttaactcaagaactgttaaagttgataattgactgacccctggtgtagaccatcccagctgaggggagtctgggaatatggacctgctctctcagggtggacgtagctatgagatttggctcctgcctggaatggggcatttccccagggcttcttccttcttccttggaaatcttgagtcagagtgaagagaagtttggggattaagtttcagagaagccccagcagagagaacagattcttctatctgggatttagactgatgtttgtggtgtgcttggatgacctgtgtctcttttcccttttgctttctttcctatagctgccaaggagcctggagccagggtccctgtgctttaggcaggcacttctcacagcctcggagaagtccaggagctaggtcaaggcagrgggttgggggccacagacaaggccaaggcggggcatggaacagcaggggtcagatgttaggggaagtacgtcggcacccgggtggggatcttgaatactatgtcaggcacccacaacaagagctttgggtgctttgtgtctagggccgggtacccttgtttctgctgctgatgccgtgtttccagtctggattttagcaaaattaactgacccatccttctatctgatgcctgttttcttctctctcattagggagttctgggtccagcttttagcccacttatctgcctccagctttcagcctacttatctgccttccttaatcttttcccccttctaacctcttttgctggcctgtgctcccagagttcccagagtctgtctacacaactccctgtatgtccttggcctaggaattttttcctgtgtttctctaaccagctccttagaacctggaacttgtttccatggtctatacttcttttctctatttatccatctgtcttctgattgaaaaaaaaaattatttatttttgaaaatttttaaatytttatttatttatttatttatttaattttatttttgagatggagtcttgctctgtcgcccaggctggagtgcagtggcgcaatctcgcctcactgcaagctccgcctcctaggttcacaccattctcctgcctcagcctcctgagtagctgggactacaggcaccccctaccacgcccagctaattttttgtatttttagtagagacggtgtttcaccgtgttagccaggatggtctcgatctcctgacctcatgatccacccacctcagcctcccaaagtgctgggactacaggcgtgagccaccacacccagccattttttttttttttttttttttttgagaaggagtttcactcttgttgcccaggctggagtgcaatggcatgatcttggctcactgtaacctccacctcccaggttcaagcgattctcctgcctcagcctcccaagtacccgggattataggcatgcaccaccacgcccagstaattttgtatttttagtagagacggggtttctccgtgttggttaggctggtctcaaactcccgacctcaggtgatccacccacctcggcctcccaaagtgctgggattacaggtgtgagccaccgcgcctggcttttatttaaaaaaaaaaatttgttttcaattttttgttgttattttttttgtgtttttttgagacggagtctcactctgtctcgcccaggatgaagtgcagtggcatgatctcagctcactgcagcctcccccgcctgggttcaagcgattctcctatctcagcctcctgagtagctgggactacaggcatatgccaccatgcacagctaatttttgtatttttagtagagaaaagaatttcaccatgttggccaggctggtctcaaacccctgacctcaggtgattcacctgcctcttcttcccaaagtgctgggattataggcgtgagccaccacgcctggccttaattttttttttttttttaaagaggtgggggtctcactatgttgactaggctggtcttgaacttctgccttcaagcaatgctcccatgtcagcctcccagagtcctaggattacaggcgtgagccactgtgctcagcctgaaaaaatatttactgaagccctctttatggtagatgccgggaaaatattgttagtttttgctagaccttgctgagatggcttgggtaggaaggcatcttagagactggttggggtgggagcagagcaaagggtttggagcctctgaagaggcttctggtcccttagactgaaaccatcttccatctttttttttttctttctttgttttgagatggagtttcgctcttgttgccgaggctgaagtgcagtggcacaatctcagctcactgcaacctctgcctcctgggttcaagtgattctcctgcctcagcctcctgagtagctgggattacaggcacctgccaccacacctggctaattttgtatttttagcagagatggggtttcaccatgttggccaggctgacctccagctggccaggctggtctcgaactcctgacctcaggggatctgcccacctcagcctcccaaagtgctgggattacaggcgtgagccaccgcgcccagttcatcttccatcttttcacctccactgcatagatgtgcctgttatatttctgagcccccttcccccagcattgaccttggggtggtgacagtagaaggctgaaaccaacatagctgaaacctctgcttctctcacctggcaggtaaaagcagctgttaagtatgcccttagcgtaggctaccgccacattgattgtgctgctatctacggcartgagcctgagattggggaggccctgaaggaggacgtgggaccaggcaaggtaaggactggggttgtaaatagaggtggrataagagaacttagaagctgaagctagggctggggcccagctggagggaatctggcatcagcttccttccagttcctctcccagagttgagggtgggtgagaccacgtgctcatggctcttctcactgtgggccctgccccctgcactaggcggtgcctcgggaggagctgtttgtgacatccaagctgtggaacaccaagcaccaccccgaggatgtggagcctgccctccggaagactctggctgacctccagctggagtatctggacctgtacctgatgcactggccttatgcctttgagtgagccttgccagagcctcatctggggaatcagggggttgagcaggatggtgttagtaacttattgtaagtcacagcagcagagcaggataggaacactcatttgcatgccaagctgaggagcttgacatgggatcttagcctcttctgctacagcagcttagctgtagctacaggagtttaactctggaaaaaggaaggcagtctcacatggtgtgtacccsagggtatgcacctgtaaccctcctgctccctttattcatttagaaaaggtgctgactyttctgttgagcacctggggttacagtaataagtaagtctcagcagaagatgtgagaagagctcaccattagtgccgtgccctgtgctggaagaagggtggataactccctgaggatgagttaaggaagacttcctaggggagaggagatatctacgtctaggaagaggagggggcataggcattccatgtaaacttaacacctgggttacgatctggaaggatgaaaaagcatggctttttttggccaggcgcggtggctcacgcctgtaatcccagcactttgggaggccgaggcgggcggatcacgaggtcaggagatcgagaccatcctggctaacacggtgaaaccccgtctctactaaaaatacaaaaaattagctgcgcgtggtggtgagcgcctgtagtcccagctactggggaggctgaggcaggagaatggcgtgaacccaggaggtggagcttgcagtgagctgagatagtgccactgcactccagcctgggcggtaaagcgagactccatctcaaaaaaaaaaaaaaagaaaaagcatggctttttaaaaattcttggccctttgtcctctctgggattggagtttgggacatagagtggctggatgggcaggtagggtagaagcctggcatttgtgtccacacttggtggggctgtctctcactcaggcggggagacaaccccttccccaagaatgctgatgggactatatgctacgactccacccactacaaggagacttggaaggctctggaggcactggtggctaaggggctggtgcaggcgctgggcctgtccaacttcaacagtcggcagattgatgacatactcagtgtggcctccgtgcgtccagctgtcttgcaggtaaggacagcaagcagatgagtggtttaggggttgtctgctcaagagcatgagggagcagacgatggatctgcttaagggagatagctagcaagttgtcagagtgttggtgcagaagtcctctgcataaaggtgggcattgaagcagtgggagagaatgaaattgccgatgggaaatggtgagaaaagcaggctgaaggggagtggaggagtcagcaatagggggtggtccagacatgcatgtctgggatgggccaagcaagctgggtgtcaccacttcatggtgatgggttattctttggctcaggtggaatgccacccatacttggctcaaaatgagctaattgcccactgccaagcacgtggcctggaggtaactgcttatagccctttgggctcctctgatcgtgcatggcgtgatcctgatgagcctgtcctgctggaggaaccagtagtcctggcattggctgaaaagtatggccgatctccagctcagatcttgctcaggtatggggcagtcttagggagagggccctgggttgggaggcaagggttaagggatttcttatttcagtgtctgggtgaggctgaggatcttgccttgtgatctggagggaggccactgtaggcatatttcccatttcagcagggctcaggtgctccaggagcttagggaagctgcatggggaacaaaatagtgcttatgaatactgaccccttttcctcatctgtctaatcccccaacttaggtggcaggtccagcggaaagtgatctgcatccccaaaagtatcactccttctcgaatccttcagaacatcaaggtacttggtaatgggttctatcttctttagctctttgggacattttcttggccctgactctacctggctaaaaaggcagtgttgtggaaccccagcttctgctcacaaagctggctttcttgaaccccactctccatcctcaggtgtttgacttcacctttagcccagaagagatgaagcagctaaatgccctgaacaaaaattggagatatattgtgcctatgcttacggtgaggatgtatcagcctcctagacttggggaatgtgagatttggggtgggattctggcccaggtgtgacctaaggcttgctggttgtgagaaggacacaatgttgtgggtgggattgctatgctggacatagtgccctcatttctctttattgagctcagggaagtagtatggctcagggataaggcatataacctgtgagtcccagtcctgcttcttgatatcttgtaacctagagcaagttattaaacttctccaagcctcagcttcctatgtgtaaaatgagcccagttcctgacatgtagtagattctcagtaaatgatatgaggagagcccagaaggcgttgttgacctcactcgagggattggggttgggagggaagtcggctgtacttagggaaataaatggttcctggcctcttgatctcagttcagactgcaaactcttaggggcaggggtagctacatatcaggctatgggtttggtgctagaatggtgttgatactgtggtgttctctgakgatggggatcccagccaatgccatctggcatagtgctgtacacagrtgagtttgtttaggaagatttggggaagatgcctgragtctttggaatggcaactcctgctgatggagtaatctatctgtctstctttccaggtggatgggaagagagtcccaagggatgcagggcatcctctgtacccctttaatgacccgtactgagaccacagcttcttggcctcccttccagctctgcagctaatgaggtcctgccacaacggaaagagggagttaataaagccattggagcatccatattgcttgcttgtcttatttgcctggtcaggcctgagwtggaggctgtttccctcagggatgacagacctcgggctgctggatgtgacctgcccttgaagcccaaatattcatatcctggttctggaggaacctgtgaggaggctgagtaattctgtatccttgcattaggcacgttgggaagtagcgccatctactggcacatcttaagcactgcatgcttccctggagtcttctcaagaatgcctcaaattggccacctcaggagtgagcgatcagggcaatgattgtccgttggtttcaaggcagtgctggacctgggccttaagtttccatccccctgtcctgaccagtgcctaggtttagtaatttgaagagtccaagcgacttacattaagaagttagggaatcctagcttgcaaaatcacaaaaggtggggacaggggctttctccatcagacactatagtcagtgtgcataggtgacctgcaggaggcaacagtcctgcccagaccttgtcactcggcccctaaggccctatcttatgcactttttattggtgggcaccagagaccactgataaacaggttttaggaaggtttatggcaaatctctctaacctccagtcacacgaaactctttactttcccaaaccattgctctttgttcaagaagtatttattgggtacttatgggttaggcatgatgctaagccctggggatatagctataaccaagacacataagtccctacagcctacttgaggagacagactaagtaattgcataattagtttaattacagtcggaagaagtgttatgagaagtgcagggcgagtagcctacttatttaatcagctaagatctgaaagatgaatagggattaattagttaaaggaggtaagagtgggaacagcattccatacaaattggacagcttagggaaaagtcttgaaactggaagacgctgctggaaaagcctaaagaagacttgtaggacagcaactaaaagtaagggggacctggtggtagaggcgatggcataaaacaatgctggcattggtaggaactgatgattggaaggcctaaaagactgttgagatttctattatttattttttgaattgaggtctctgtcaccgaggctgtagtatacaaaaattttaaatttttatagagattaggtctccttatgttgcccaggctgttttttgtttgtttgttttgtgatggagtctcgctctgtcacccaggctggagtgcagtggcgccatctcggctcactgcaacctccgcctccttggttcaagcgattctcctgcctcagcctcctgagtagctgggattacaagtccccgccatgacacctggctaattttttgtatttttggtagggatggggtttccccgtgttggccaggctggtcttgaactcctgacctcaagtgatctgcccgcctcagcctcccaaagtactgggattataggcgtcagccctcccaggctgattttgaactcctaggttcaagactcctaaattcttggcctcccaaagtgttgggattacacgtgtgagccactacacccagccgcttccaaatctttgtgaacagtgctgcaacaaacatggaagtgtagatctctctgatacactcatttcctttcttttgggcatatactcagcagtgagattgctggatcatatcgtagctctatttttagttttttgagaaacctctaaaatgttctccatagtggttgcactaatttacattcccaccaacagtgtttgagggttctcttttctccacatcctctccagcatttgttattgcccgtcttttggataaaagccgtttgaactggggtgagatgatatctcattgtagctttaacttgcatttttctgatgatccgtgatgttgagcaccttttcatatgcctgttttccatttgtatgtcttcttttgagaaatgtctattcaaatgttttgtgtattttcactggattatattttttcccatagagttgtttgacttccttatatactctggttattaatcctttgtcagagagatagtttgcaaatattttctcccattctgtgggttatctcttcactttaatgattgtttcctttgctgtacagaagctttttaactagatgtgatcccatttgtccatttttactttggttgcctgtgcttgtggggtattactcaagaaatttttacacagatcaatgtcctggagagtttctccggtgttttcttgcagttgtttcatatttcgaggtcttagatttaagtctttaattcattttgatttaatttttgtatatggtgagagataggggtctagtttcattcttctgcatatggatatcctgttttcccagcaccatttattgaagagactgtcttttccccagtatgtgttcttggcacgtttgttgacaatgagttcactgcaggtgtgtggatttgtttctgagtcctctattctgttccattggtctatatgtctgtttttatgccagtaccatgctgttttggttactatagctctgtaacaaaatttgaagtaagataatgtgattccttcagttttgttctttttgcttagtatagctttggctattctgggtcttttgtggttccatataaattttatgattgtcttttccatttctgtaaagaatgtcattgatattttgatagtgattgcattgaatctgtagattgctttcagtagtatggacattttaacaatattgattcttccaattcatgaacatggaatatctttccatttttttgtgtcctcttcaatttattttgtcagtgttttatagttttcattatagagattttttctttggttaagctcattcctagatatttggttttatttgtagctgttgtaaatgggattactttatttcgtttccagactgttcagaaattagtcttgacttaaacatctcaccctgcctaacattaacattctctatagcaaatgtctattttgttgttgttaacaacttacctgaaaaattagcaacagacatctttgtctaatcactgtggttgtaggaaaatccaggttcttgtcacatgaacaggaaagattaggctcgcagaaactttgaggggtgagggggatggaatttattggggaaaaaggaaaaacaacacagcaaagcaagagaggggttcctgttaacaggccctcatctcacagattgaatcccaggttccacacaggaacaggaggggccaggctcctccccgctgcaaacagcatgaacttccatggctccaccccattctcccagtgcgcaggccagtcagaggttctctgggaacccctttatacttggctgtctcattcccccgtctaaagaagtacatctaactgctcttagagtgaggctaaggacaaagaccaatcttaactgcttcctgctgacagggggtgtgttttgggaagacggcagtcagatctccctcagaggcctatattagggtcccctgcagaaggggccattgtccaaggctctggttgcatgtctgtttggagtttgatggcctgaagctgagaagagacaaactgggttattagaaaacatgtatcaaaccaaaacaagggtaaggacaggtgaaaaatcatgaggccttttaccagtttgtatggggagagggaggccaaaagcccaattggtaaaaaaaacttttacccttttgctggcatgtcaggcttctgggttcccttcctctgagcccaattctaagttagccagtttaaggttcgggaaattaactctttctcaatttggaggattatctgaggggagaaaaaaaaggtgttttttcaaaggagtcccagaagttcaagatgcattcaaaaggagtacaaactgaaggtgaatggctactcatctagaaaggggcaagcaggcgcccctagttcctttctcttcctaccaaatacctggggtatgtgagggagggaaagtgaggcattcctctttctttccaccatccttgtatccctgagtcctggcgaatgcaacagcatgccacccatgggtgttaaagaggcttttacccatgttaactagcggggctgggggagggaattattcactctactcacatacgccttatctcccctgctgtaagtagccgtgaattccctagacttcatttacgccatggatactagcatgacttttatccatgaaacagaaagcttagcttaattggcaggagtcagccacgctcacctgtgctgtgccttttaacttccattatcttctgcctctggatccctcagatccagtcttctttcctagggctttgacccaaagcttggaattgagtttgagacaaaaatgtgtcttggagggagttgcacggactccttatcataagccaaatgctaaagtgaagctgtggaattgagtcctcccccaacaagggaaagaaaaggttgtcttgtgacacacccagataactggtggctatagttatgcttgctaggatttgggtgcatggtgcttggctttggttagctcccttggtcttgctttcccaaaaaggaaacccccaggtgatgggcaccctatttattcccattgcctggcaggatttgatgtataattgctcagaacaagaatattgatccagatttctacattacccatcccttttgttctttctgagctgtagctggagattgctggttggttcacaggaacaagcagggttagtctaaaatgcaggcaaagacttaaaaacaactaattagtttagaatttaatgacaaatgaagtcgggtgcggtggctcacgcctgtaatcccagcactttgggaggccaaggcaggtggatcatgaggtcaagagattgagaccatcctagtcaacatggtgaaaccccatctctactaaaaatacaaaaattagctatggtggtgtacgcctgtagtcccagctactcaggaggctgaggcaggaggattgcttgaaccctggaggaggaggttgcagtgagccaagatcgcaccactgcactccagcctggcaacagagcgagactgtctcaaaaaacaaacaaacaaacaaacagaatttaatgacaaatgtatacgttttgaaacataatttctttctctgcagttctcatttatttttatttttatttttcaatttttcttttgttaccagttctcatttctgttaaaaaatcatgataggactgagttgtttgcaaaatagactttagtcttatacttggcctgattagttgcataaagtgcagcaagaataactatttctacataggccttttagattggctttgatgcaactctgttccacaaggactcttagagaagaccttttaaagccgagcccagccatgggtctgtatccttaaatacctgtgagttgagtgctcctcttctcttaaggtcccaagataaacttggaactctgggccagttagaaagtgacactcttggctgggcatggtggctcacacctgtaatcccagcactttgggaggccaaggcaggcggatcacgaggtcaggagatccagaccatcctggctaacatggtgaaaccccatctctgccaaaaatacaaaaaaaaaaaaaattagccgggtgtggtgccacatgcctgtagtcccagctactcaggaggctgaggcaggagaatagcttgaacctgggaggcagaggctgcagtgagccaagatcatgccactgcacgccagtctgggtgacagagcaagactctgtctcaaaaaaaaaaaggaaagtgacattctttactgaccacaggtcaggaaccctgtacagggactgtgtaggcaagggtatgaagccagttttctccccaaggggatttttttggctctgcaactcgagcttgactgcttaaagggaagcatacccttgcactcaaagccttggtaaaacaaccagtttctccagt

SEQ ID NO: 94628 - DNA, 12688 bp, Homo sapiens
aagttggggtgtagtggctgggcgcagtggctcatgcctgtaaccccagcactttgggaggctaaggcaggcagatcacttgaggacaggagttcgagaccagtgtggccaacatggtgaaaccccgtctctactaaaaatacaaaaattagctgggcgtgggggtgcatgcctgtaatcccagctactcaggaggctgaggcatgagaactgcttgaacccaggaggcagaggttgcagtgagccgtgatcacaccactgcactccagcctgggcagcagagcaagactctgactcaaaaaaaaaaaaaaaaagttgggggtagtgatagaatcagagctaggatgtgaggcaaggcagggctgctgggcgtagttgttcatgtcacacactgcacaaaggtaccacatctaaggggcacctttcacatcaagaccttgtagaactgtatgtttcttacgacatttctttggcagaaggcagtttatcattctaacgaaatcagtgcacgatggcagttttccagtaaatggaagtaaaatgtctggaggaagggatgcccttgccaatgagtacaaaggcccatatgggctggtgtcagccctcatggagaattcattggtcaagactggaagagtctctcggtcttggcaccatcttcttggaaacctctgtgccacgagagctaagtggaggaagaagcaaatatacaagtggaagcgcaaaagaagaaagatgaagccgggcaaggtgcctcacacctgtaatcccagcactttgggaggctgaggtgggcagatccacttgaggtcatgagttagagaccagcctggccaacatggcgaaaccccatctctactaaaaatacaaaattagccaggcgtggtggcacatgcctgtaatcccagctacttggaagactgaggcaagagtatcatttgaacccaggaggtgaggttgcggtgagccgagatcgtaccattgcactccagtcttggcaacaagagcaaaactctgtctcaaaaaaaaaaaaaaagaaagaaagaaagaaaaggaaaaaagaggccgggcacggtgactcacacctgtaatcccagcactttgggaggccgaggtgggcggatcacgaggtcaggagttcaagaccagcatgaccaacagggagaaaccccatctctactaaaaaatacaaaaattagccgggcgtggtggggtgcacctgtaatcccagctactcaggaggctgaggcaggagaatcgcttgaacccaggaggcagaggttgcagtgagccgagatcgtgccactgcactccagcctgtgtgatagcgtgagattcaaaaaaaaaaggaaagaaagaaaagcaagtgagatgccagtcacagctgtgcctggccctcccactaggagacaatgcagcacaatgagaagggtattggagcccctggtcctaaatcctggttaggagctgcatgcctttgagcaattcatgcccttaatctccctaaatcctgggatcccccctttagtcttcgcaggctggaaaatggaagggcccagctctgaatatcactcagttccgtgggagaaaagctgacactccagtgagtgccggcagcgcccccagaggattccatgaggcaatgtatgcaaagtgctggccttgtacatgctcagggctccacaaccgtctgcttcttcctccagtgagtttgcactccaggcaatatttagtaacgtctggaaacattttttggttgtcacatttgcagaggtgggttccactggtatcgagtggctggaggccagggacgctgcttcagcgccctacattgtacaggacagcctcatagcaaggaatgaactggcctgcggtgtcagcggtgcccagcctgggaaacaccgcctactctcaaacacttttgagctcctagaaagcagaaaaatgtgtctcgtcttgctgttgttgttgttgttgttcttgttttttgagacaggatctcagtctgttgcccaggctggagtacaatggcatgatctcagctcactacaacctccacctcccgggttcaagcaattctcctgcctcagcctcccgactagctgggattacaggcgcccaccaccacgcccagctaatttttgtatttttagtagagacagggtttcaccatgttgtgcaggctggtctcgaactcctggcctcaggtgatccgccaacctcgacctcccaaagtgctgggattacaggcatgatccaccgagcccggtttaggttgttacctttgaatactttgtggacactcatgtggatgagggcctggccttgtcccgtgtggccttctagaaggcccagtgctctaaccagggcctgctgtgaggcatgctgggtcttcagaaggcagcctggcaggacaggtagcaggttctaattacaccatagggggtcccatgtgacagttaatagcagtgccaagtctgggccaggttgggccaataactggggggcaacctaccctgtaggcaaggccttgcagaggaggaagtttgggccagagaatacctgctgccctctggtggtgtctttttaaaaaaggaatttggctgggcagggtggctcacaactgtaatcgcagcactttgggaggccatggtgggtggatcacctgaggtcaggagttcaagaccagcctggccaacatggtaaaaccccgtctctactaaaaatacacaaattagccgggcttggtagcgggcacctgtaatcccaactacttaggaggctgaggcaggagaatcacttgaacccgggaggcagaggttgcaatgagccaagatcatgccgctgcactccagcctgggtgacagagtgagactccatctcaaacaaacaaacaaacaaacaaaggaatttatgggctcagatttttataggaagccgagttccatttaggccacatggtatttgaggtgacattgacacctgggggcttcgtgcagcaggcagcgggcttcatgggctgggtccttaggaaagaggactccctggagagatggatccagctccacgttggtaagcactgagaactgcaggtagagagtggatccagggccaagccctggggagcccccttattgaaggggtgcgtggggaaaaaggaaccaggaagacaaccaggaagaaatgtcatagagggaggaggaagaggagagccacgagacagatgagtcacagaggctaagggaagcagacccaggaaaggaggcatgacccacgcatcacatgcaaggagatggaaggtgcaaatggggccacgatgctgagtgctcacgctcatggagctctcaccatgctccaggctctgctccaagctctgagcatcctcacaatcaccgctggaggtctgtcctatgacggtcctgtgttacagatgaggacccaggagagggaggtgaccaagggctggtggctggtgaaaggcctgttggaggcagctgaggctgtgccaaaggtaccatctgggccccagatttcttttggagaaccaccttcccttttcctcagccagtagacacagggctctgattgatctacgtgaattggcagattccatcccaagcccctccagtctcactgatgcattcagggatattcacgtgacctaaatcaagtcagtgagatccacacccaggactctgagagagaggagctctatttctgttgtgctgagcgtaaagctgagatggtgaagcctgaagctgctgcagccgtcttgcaggcatgaggggtaaacctgtctgagacttgggacaatgcaagttaggaagtggagctgtgctcagccacaagagagctggatgacaatgtgactgtacccgaagccgacattacccctgaactttaccattagtaaaccagtaaattccttgcctgcctcactggtttgggttggtttttctagtttgcctcactagtttaggttgtcattaaatgaaagcaaactgtaccagttatctatggccacaattaagctgtgtaagaaaccaagaaacttagcagcaattgggctcatgagactggatcagtatttaggctggacttgactaggcagtttttctggtctcagctgggctcacacacgttggtcagctgggatgagtgggaaaaccaggctacatgtggaggccaccatgacaaacatttgagtcactgttgatgttttgcctctagaagctcttggccatccaaattccaggataggaatttggaaagtggttggtgaaactgatgcggggttgggcttttctgcaaacacttcagataaacagaattgcaagaaatgcattcatatgagagaagctagtctgttgcagattgtctctcagttccggtttgtgtactgtttccttgggattcgatccaggtggttcatttttagcagcagacttcacaggtgctgtggggtccttttacagacgtggaaaatgggtataatggggagggatgtcttttagctcagagtttggcacaaaataggcacttaatcaataatgtctgtaaatactgatgatgatgatgatgatgatgatgatgatgatgatgatgatgatgattcaccataggacatgatttgagggttgttaacttgatcttaaacggcatgtgggtcaataatgccctcttctggctaggtagggtgtctacatcttctccacttcctcaaccctgtggaattcaaccctcaccccatccccactccaagtacctgcagcaggtacctttctgggctttgtgagtgtggccagaagtccaagcagtcccagcccgcaggtgtcagactgatgcatgcgtgacactttgcgagtggtcagaaaacatgagcccttgctttggccaccaggactgtggtcacacctccttccatctctgggcctccgtctctccatctaacatggaggttgcacagccacccaacaggggaccatggcagagctcaaaaggtgtctgttcagccgggcgcggtggctcacgcctgtaatcccagcactctgggaggctgaggtgggcggatcacgaggtcaggagttcgagaccagcctgaccaacatggtgaaaccccgtctctactaaacatagagaaattagccaggcctggtggcacatgcctgtaatcccagctactcaggaggctgacacaggagaatcgcttggagacaggagaatcgcttgaacccaggaggtggagattgcaggagctgagatcgcgccactgcgctctagcctgggcaacagagtgagactctgtctcaaaaaaaaaaaaaagtgtctgttcccaccgcctgagactgtctttaggacacacacaggggacccccaggacaactccagtgcccacccggcccagaggaagctccttggaagccccgacatcccaaggctccaggtgctgtccaagcacaagttcaaggttggctacatgggagggagatacctgctcctgggagtccagagagtccggtgctgagagtccaggtccagaatctacaaggctgtgaccttggatgaggcatttagaacctgacaggaaaaactactgaggcaggagcacttattttgatgccccagagcagaattgtagaaccaccccctctctgcagaggcaccaaagccttcatccagatccccaaaagggtccctgcccacctgcaggagggtgggtgcccctggtcctaggagcctggttcacttctgcttccttccaccagacctcagcccagcatcctccacttcccagctgcttccacctgcggctgggggacacgtcatccctaagtgaaggtgctccctgcagccccctctccccactggccatccagtccttgggaagttcttgcaccccatggatccagaagtaagggtgtctttagcaagaccagagccacctgttcccacccctccctgccccagagcacccacaaaccggccacacatgcacacaattcagactttgtagctgtttttattattaatattatcttctcctttaagcatccctttaagggtgaaatgaaatccaaccatttacagagaaaatgatttcagaatgtacatattgattttcccttacaaaaaaaataatactattattgatgtccttacattatgcatttcccagggtcctgccttctgcttggacaagtcccgtctccccacccagactctccctgttgcccccaaagatctcccatgctgcccctgggaaccgacgtgacccatgggtggataaggccagccatgcttcccggatgcttggcatggacaggcctccttgggtctaggggtctcagggccagttattcccggggagaaaggtggacatgggacatggcagcagtgtgccggtggtcacattcagcttggtttcccttcatattgagggagtggccctgggttcttctgcccccaccaaattcccagtgtatgctgtgatgatatgtgaaactcttcaatccygtgccctggcccccagccctctgacagctgccctctccaccgatggccaggccttcactcctgctgctgtgaacaggacctgccccaccaggtctgtgaggaaggcagagcctggcagctctgagctgctcctatcttccttcgcttagccctgagctggtgccctggaggggcatcccatagcaactgaggatgccaggggcgtgggggtgggaaagctgccaaggagggaggccccaggccagggcctgggcatgatcaggagccctgagactccctgtccatggggtgcagcctggcctagattgacccagagccatagggaccccgagtgtttgagccacctctcagccccaagagcaaacagaaaggaaggctgctgtgacttcaaaggagttccatggggggcagtcccctagatgggagcaaagtggctcagagcccctcagcccacttcacgcttgcccaccagcggctcctctgaggccagctccccacaccatgccctcactgggcacttaacccagacagtgctgtcgcaagaagatgccctcctctcctggcccatcaggaaacccccaaccataagacatctggagaaagccccactggaggtgggggggaggggacaggtgggatgatgcggctggggccgagaggggctggggaggtagtgggctctcagctgcacagccctcaggtcaggattctcattcctcagactgaaagacagacagacagacagaccctgcatcccctttagctttgctttctaggctccccaagggctttctgcctcagtcattttggggagctgcaggaggtgtggccacaggcccgaggaagaggccaggcctgggcctggcctcttccatccatacacaagcatgtatttacagggacacagcaatacagacatgtacaaatacacaccaagcatgcacccatgcccataaatatacacacacacacgcacaaacatgagccattccacaggccaactctgcaaaccggcatcattgggtagcgtctgaggggccgaggggagggggtgtttccccttcccacagagctgcaagctcctcactgcccccagccctgggctgcacagtgagggaaacaggagcaagctgttccggaaactctgacaatgagagctggatccgacgactgagttattgctgctccctccccctctcccagagatgctactggtcccccatatccattctcttctcctccatcaataagataactcccaaggtgaggccaggcacatggcggccccgctgaagactacacttcccaggttccctagcagctgcttgtggccatgtgactgagtcccagccaatgagaggccagcagaggtgagcctgccaattctggctcatgcctttagcaaaaagtgggtgtgccctcttgtctatttctgcttcccccaggcttggatgcacacaggagggtgggcgctggagcagccgctgtgtacccagaattggaaggtgcgtatgaagaaacgcagagctgccctaccagctctgggccatctcaatctagactaattagaaacaagcttccatcttgcttaaaccactgtatttcagggtctcctaatcacagcagctcagaatcaactccaacaaagacatccccaccaaggcaagctatgaggaacaggaagcatacaactggccttattgtccctttttgggcccaagacagcctcatggcccctttctggcccccagccagcctgccccaaggaagggcacaacagtgactgcacctgggacagtggacagctgggactgggtgtcagaaggaaggggtgatggggagggagagacggatccgtgcagaggactcatgtcagtcttctcctccccacttccccctcaaggccacacctacaactggactcttggccttgcaaggactgagtgcacagtccacaagacagcaatgtgaaagggagaaggaacgtcaacgccgggtttagaaccaaaaggaaagctcctcagggttctccaggcccctgtgttggctcacgacagcctgaggggtgcacagagacagactcaggcaccagcatcccagggcagccaggtcctgtcctttgcggcagggggtggagttctgtctccatctggcccagcacttctgactacactgcaaagcatccctcagcacctcctcttggtaggatgtggctttttcatctcttccctacgaggtgtccacgcttcctcctggacccaaatgcatctacttacagagccctgggtcctcctggcaggccggtctcccacacggagcccaaggcccagggatgccaaatggtgggctttttcccggcctggccaccccccagaggctgcctggtgagatcctgcaggctctcttccccaatcctgcctaccctcccccgctacccagggaccaccacgcacactccagtggcacctcctggccacagcagtcttggcagtcataagggccacccagacgtcacggcctgcgccctctcccaacaggagggatattttctgagctcaaaggcctgacccttgattcacaagggcttcagtagggaaaccctacccccacccccactccccacccactcctggtcccctcaagaaccaaggagccggcaggaggcagggagatagcgctaggggccgccgccacccccgccctgtcacaaaccctatcagatcatgcagctctagacttccgcctcgtccagtttgccccgggcgggcggccttccctcgggacccctgtggcgccacccgcccgccgccgtgctcctgggctcctggtaggggttgtccagcaggtagtggaaccggtcgtagttcttcagcaggtacttgggcgcatacatgtgctcgctggggtctgcaggcgggtactcctgctgcgtgccgtcgaaccagcccccggtgcggatcaggccgcggatgtagttcaggtcccgcttgtcctcgtagtcaccccagcgtgggaagtcgccattctgggcggacacgagcttgaagtagatgccctcgggcgtgaagcaccaggagcagtgccagccggcgaagtgcagggggctgcccagcgaccactgcaccaggatgtggccggtgcggttctcatactgtctgaagttgggcatggtgtagtactggcggcggcgcaggcggatgccgtccagcccatacactgcctgcagcatgtccaccgtgcagcctgacaccacctccagggtgcccggctgcttccagaagaagccgtagagygacttgcgcatgtggaaggcgaagggctcggtccagccatcgtagagcttgaggaaaaggacgccgtcacgggccgggatctcgtccgcatcgtcaatgatgaagacgtcgtcgggccgcaggttgcgcagccgcgagacgccgtcctgggtgaggaaggtgcgcaggtagtcgtcggcgatccagccgtcctgccggccgccgggcgggaagtggtccaggaagacatagagcaccttgtggcggatgtactcgaaggtgccattggtcagcatctcccggaacttgagcggccgcggctccccataagccgtgaagttggactcgcacaccacaaaggcgtccaccacgtcgcccagctcgtggaagcgcacgtccagcaggtcgaactcgtggttgacgttgatggcgttgatgacgcggcgcggcacctccctgggcaccagccgctccttggtgggcaggttggagtactgcaccacagtgggcacgccgcagctgggtccgtgccagccgggcaggcacacgcactccacccacttgcgccgggcgcctcggccccccgtgcgctcccgggcgctcaggaggtaccggggtggccgccgggccgaggagccgttggccccctcaggcttctcctccggccgtcccgggggsggcctctccagcatcttggtgccgggtttgaagcagacgccgccggccttggtgcgcacgaaatactcggtggtgtcctcgggcagcaccaagtccacccggtggagctcctcggccgccttgctgggcggcagcggctgcagcaggggcgagtgggagtagagtggggtacgcagcaggtcagggcctcctggctcggggctggcctggggcgtgaccggggcattgttccagaaaaagctggacaccaggttagggctgagggaggccagttctcgggggaaggtgacataggacagggtcttgaagaagtgcaggaaggagatgaggcacaggccggccatacagaacatgagaaagagcttgtagcgtctcatcttcatcctgcgggrgagagagagacaggagactcatcagggcagcccaggctcctttcctaggaaggggacctaggaggcctctgctgccaccttgctggacaatgtggtggccagcacctgctgcccctgcatggagtgacctcctgcccccaagagtcaactcgcggtaccaaggcccctgaaagccccagcactgaggacaccgccgtgctcccatagcccttccctgagatccccaggccaccaccctgccccctctgcagcctgcttctccgcctggcccaccccaccctgactgtgcggctgcactgctaggcttggctccaggagtaacatgcgccttgggaaaagctcaactcgcagtacagactccgccccaggacagaacggggagagcaggctgtaggctgccctcctgggtcctgtccctcccctcctatcttcttttttatggacatactgacaaaccttttgaatattttttcactgaaaaaactcacaggtctcaagggaaaacacttaattctaacatatttaatgaataaaattaggccaggcgtggtggctcacgcctgtaatcccaacaccttcagaggctgaggcaggaggatcacttgagcccaggagtttgagaccagcttggacaacatagtgagaccccatctctacagaaaatttaaaaattagccaggtgtggtgccatgtgcttgtggtcccagctacttaggaggctgaggtgggaggatcacttgagacctcgaggttgaggctgcagtgagccatgattgcaccactgcgccccagcctggacaacagactgagaccctatctcaaaaacaaaataaaataaaagttccccttcattattccatgccctttactaatctccaggcataaaaatttgaggtcggccagtgcagtggctcacgcctataatcccagcactttgggaggccgaggtgggcagatcacaaggtcaggagttcgagaccagcctggccaacatggtgaaaccctgtctctactaaaaatacaaaagttagctgagtgtagtggcgcatgcctataatcccagctataccggctgaggcaggagaattacttgaacccagggggcggaagttgcagtgagccatgatcacgccattgcactccagaacctgggtgacaagagcaagactccatctaaaaaaaaaaaaaaaaaaatttgaggtctatctctggctttatatgcaatttttctattcttgatttaatatttttcataaatactaccatattggacactaagtctaaccaagttgttttcctcaatcaatgatagatttaaaagattttggtatcagtagaaataaatgtaccagttccttttaaatcccacatattacatggctattgtgaataaatcactctgtattcatgactcatgatgtaaccatttgctattcatttatacagtttaatttatcaatcagtttatggctgtggaatggagatgcttgtatattctcattctccaatttaaattttttttgtgtgtttttgtttgtttgtttgtttttaagacagagtcttgctctgtcgcccaggctgaagtgcagtggtgcgatctctgctcactgcagcccctgcctcccaggttcaaggaattctcacctcagcctcccaagtagctgggattacaggcacacaccaccacacccagctaatttttgtatttgtagtagagatggggtttcgccatgttggctaggcaggtctcgaactcctgacctcaggtgatccgcccacctcgacctcccaaagtgctgagattacaggcatgagccaccatgcctggcctaa

SEQ ID NO: 94629 - DNA, 35943 bp, Homo sapiens
  misc_feature (1)...(35943): n = A,T,C or G
tacttttttttttttttttttgagatggagtcttgctctgtcaccaggctggagtgcagaggcacaatcttggctcactgcaccctccgcctcccaagtagctgagattacaggcacacgccaccatgcccagctaattttttttgtatttttagtagagatggggtttcaccatattgtccaggctggtcacaaattcctgaccacaggtgatccgcctgcctcggcctcccaaagtgctgggattataggcatgagtcaccatgcctggctatttatttatttattctttcattcattcattctgaaacagtctcgctctgtcgcccaggatggagtgtagtggcgtgaccttgactcctgagttcaagcaattcttctgcctcagcctcccgagtagcttgaattacaggcaggcgccaccacgcctggctaatttgtatatttttttagtagagacggggtttcaccacgttggccagggtggtctcagaactcctgacctcatgtgatccatccacctaagcttcccaaagtgctgagattacaggcatgagccaccgcacccggccaatctgtaccattttacattcccatcagcagtgtatgagacatatgagacatccccaaccagttccttcaaatcctctccaacatttgctctggtcaggcttttttattttagctattctaatatgtgggtaatggttcctcattttggttttaatatacatctccctcatgactaatgattcagatatttttatatgtggaaaaaaacacaaaaacataaaaatccttggacacataccccacaccatattaaaaattttaaatgggtcacagacattcatgtgctgatacagtcatatgctgcataacaacatttcagtcaatggaccacatacacgacaggtggccccataagattacaacgaacctgaaaaaatcctatagcctaatgacatcataactgtcaaacaccatgtgtccgtggtgatgctggtgtaaacacaccatgctgccagtcatctaaaagtataccacatacaattatgtacactacataatacttgataataaaatgttactaatatatctatttactatacttttatggttcttacagtatactccttttattcttttttaaaaaaaaaaggaaagttaactgtaaaacagcctcggccggatccttcacaaggtactccagaaagcattgttatcataggagatgacgactccctgtgggttattgcccttgaagaccttccaggatgtggaggtggaagacagtgatactgacgatcttgaccctgtgtaggcctaggctaatgtgtgtgtttgtgtcttagtttttcacaaaatttttaaaagtaaaaaaaaaaaattaaaaacagaaaaaaggcttatagaataaggatataagaaattgtttatagctgtacaatgtgtgttttaagctaagtgttattacaaaaaggtcaaaagtttaaaaaattaaaaagtctataaagttacagaaagctaaggttaatatattattgaacaaagaaaattactttttaataaacttagtgtagcctaggtgtacagtgtttataaagtctacagtagcgtacagcaatgtcctagaccttcgcactcactgactcacccagagcaacaaggagttctgcaaactccattcatggtaagtgcctgctacattttttatctttaatactgtttggttttgttgttgttgttgttgttgttgttgttgttgttttgagacagagtctcgctctgttgcccaggctagagtgcagtggctcaatctcggctcattgcaacctctgcttgccaggttcaagcgattttcctgcctcagcctcccgagtagctgggactacaggtgcccgccactacgcccagctaagttttctttgtattttagtaaagatagggtttcaccatgttgcccagggtgttcttgaactcctgagctcaggtgatccacatgcctcggcctcccaaagtgctgggattacaggcgtgagccaccgtgctgggcctaatactgtatttttactgtacctttcctatgtttagatacatacttaccattgtgttacaattgcctacagtattcactatagtaacatgctgaacaggtttgtagcctaggaaccacaggccatacaatatagcctaggtatacagtaggctgtaccatctagatttgtggaagtacactctgtaacattgtcacaatgaaaaaatcacctagtgacatttctcagaatatgacaaatgaccatattttcttgtgcttctattttctttggtgatgtatctgttcaaatcttttgctcatttataaaactgagttgttttcttatgggttttgagtgttcttttatatgttctggacacaagtcctttatcagatatgatctgcaaatattttctcccagtttattgcttttcattaattttttaagagaagtttttaattttaataaagtataatttatcaatttttccttttgtattatatttaaaaaatataacccagggtcataaatattgtcttctatattttcttctagaaattttacagctttgggttttacatttaagtccatgatccattttgtttttttatatggtgtgaggcaggaggtgcgacttgactcccaaggtggagcttggacacaggaccagattgaggaccagctaaaacagggaagaggtggaagctcttctccataaaacacaccaactaatgtgccctgtcagtttagctttgccatggcaacacccagatgctaccactcctttccatggtaatgacccactgacccaaaagttacctccctttttctagaaatttctgcacactcagccccttgatttgcatataattagaagtgggtataaatatgactgcagaactgcgtctgagctgctactctgagcacactgcctatggggcagccttgctctgcaggagcagtcttggagttgtaacactgctgcctgaataaaactgttttcagctcactcttgatttatttcctgggtgaagccaagaacactcctgggctaagggcttgcctgccctgtgtcatgcatacaactttgttttgtttttgcatatagatatctgaactacctttgaagcttagttgaaaatcagttcatcacttgtccatgtatgtgtctatttctggactctattctgttgcactgatatatatttctctctcttgatgctaatactacactttttttttttttttttgagacagggaatcattctgttgcccaggctagaatgcagtggcatgatctcagctcactgcaacctccacctcctgggttcaagcgattctcccatcccagcctcctgagtagctgggactacaggcatgtgccaccacatctggctaatttttgtagttttttagcagagacggggtttcaccatgctggccaggccgttctcgaacttctggccttgggtgatctgcccgcctcggcctcccaaagtgctggggttacaggcatgagccactgcgcccggctaacactgtcttgattactgtagccttataataattcttaagtcaggcagtattagctctcccagctttggctattctagatctttgcatttccatataaattttagaatcattttgtcaatttctacccaaaaacgcttacctggattttggttagcattatattgaatctttaaacatcttcacaatatttggtcttctgatccatgaatacaacatatccgtgtacttatttagttcttacccaatttctaccagcaatgcttttcactttttatgatagaaatcttgcgtcttttgtcagctctatccttaaatatttcatatttttgatgctattgtgaatggtattttttctaattgtttgttgttagtacataaattacaattgatcttcctatattgatattttatcttgcaaccttgcgaatctcacctattagctgtactaggttttttgtaggttccacaggattttctacataaaccagcaccagagcaatgaacaaagacaaattgtttttttttttatagatgtcatttatcaatcttcaggaagtttacaaggaagttcccagttctgtttccagattgctaaaagctctggtgggccaggttcacaagcagaaaaagtttgtcttccagactcagatgcaggatgctgagagagagacactgatgggataaaagccagtttgctgcaactgcttcaccatttttaggttcagtgtcctcaccgacaactcctcccataagctttttttttttttttttttgagacggagtctcactctgtagcccaggctggagggcagtggttcgatctcagctcactgcaacctctgcctccctggttcaagcgattctcccacctcagcctcccgagtagctgggactacaggtgacagagatggggtttcgacatgttggccaggtgggtctccaactcctgacctcaggtgatccacccgcctcggcctcccaaagtgctgggattacaggcatgagccaccacgcccggcctcctcacgttaactttcttttgccatgcaagattgggcagaggaccctggtctcttgaggttatgaatggagctggcaggacccagcacagcaacccacagtgagagaagcccttgctgccaagggtaattccccgagtgcagacatcctgagaaaagtttactctcttcacacacattttcagtcaccagaattctctcccaaagcattcagcagtctttggttaatgtgtctttctggatgccctgaaataactgaggcaagccacctgctgtaagacttttctagacgatggtcctgagccattggcaaaatcagagaggatgggcttttttcattcactcaacatatattcattgaatatttaccatgtgccaggttctgagtagtgtctactaatggacagggtattcataaaagttctgtactgttttaaacgtttcactcaaactttaaacagttgatatattacaaaaatctttctgtatttactcacgaaagcctggatcctagaatgaagaaaatacatggagcacagagccacagccatctcccagctcacagatcacgtgagtgagaaataaacttctgtggctgtaaaccactgaaggtttggagttacctgttactatatgaataaactcaggaaagccaacaaatacagcagccatgtttttcatcatcctgcaaactagaaaaacccaaaagcctattccattaagagttccttaataaagtacaaacaccagtgacagaaattgagaactaatgaaacaaaagccagctgcaagaaccactgagacataaaagaggggttagtctgtaagattacgaaccactgagatttaaaagaggggttagtctgtaaggttatgggaggtgatgctcgaatgggatctagtctcgtagacgtcaaacgttaatattctcatatatccaaagtaatgcggagagtggtttatgtagagctttacattttacatagcagctttacattcaccctcatttcacagataaggaaactgaggcccaagatggcacagtggcctcgacgcccaggttttccactttcaaagaccctccctcacatctcattacctgataatgcaacacagtctttaatcggggcgaatttcggggtggaaaggactagataatgctgataagcgtcatcatcccatatacacagcaccccaaggacagcaccctatcgcccacgcgtccaccagcccccgaaaatactggagacaaaagctgacgtcggcagagcgctcctagtccccgtcttctggtcctccacccttcccgaaaggccaagcggcggagctggggcgccaacgagaagggggtgagcgtgattgggctgtcctacatcacgtgacggccagtacgcgtgggatttggctccgaggaggcggaagtgcagcacagaaagggggtccgtgggggacrgtagaagcctggaggaggagcttgagtccagccactgtctgggtactgccagccatcgggcccaggtctctggggttgtcttaccgcagtgagtaccacgcggtactacagagaccggctgcccgtgtgcccggcaggtggagccgcccgcatcagcggcctcggggaatggaagcggagaacgcgggcaggtaataccggggccagcgccgcccctcccttgcgcccctcactgctgggcaggctggctggcgcgcgcgcgcgcacgcaggggtcttttaaatsccggccggaatacaaaggccggggccgcgcgtgcgcactgtggcctggtcggcctttccttccctggctgcggcggtggtggtggaggtcggggctgctctgagggttacctggtgcacctggacccttctttggttccccgcgataaccagttgactataaaatatattagtaagcattcagcagtctttggttaatgtgtctttctggatgccattcttggctagaagggttttccgtcaccctccattaccacgcagagagctgtaaagatgagtgtcgaacatttccagctccaggagttttcattttaaagttggttgatttgttgcggcttccccccaccccaaaggcctactgaaagcaactttaagggtcacgggttagataattttgttgtgggcatatgtatacactctcgagtagtcaatctaaaaatgacctttgagttttccagtggccttggggacgatcttaagaatccgtttttaaaaagtcctttgggggagtcragagaaaaatttgcaaaagcaggagatttagggacttgaactcctggcggaagactaaatttttaaaaaatggatatggtgacagttttttaaaagataaagagtgatgatttacattgaaattaaaaggaaaaaaacctatgcctaatgaagaattatcctgactctcagtggctaatgggwgctgaatttaggcaatacaagggacttatatgggcctgttcatgtctgtaaagttggcatgtctggaatctgattctgacatgccragaattggtgttacatgaaagggcacactaaccaaaataaattagagcttaggaaaagagatatatgtagacaaagtgtggactttatcttgactttgtggatcaagtcctggaataaattactccacttctttcccagaagaactttacaaataagagaattcaccagaatttgtggaaatctctctctcataacctcacttaagagcagaattgaaacttgggccaagaataaattacacattgtaagactttattcagggtcttacagcaaaatagtaggacttcaatacactgtttagctcaaagctgtgatatgtcggcctgacttcatccaaaaggctatagaccagattttattttgccttgaaaagctttcaccttcaggaactgtggaaaattctgtgtaatcttctgaaatgactcagaccccaggtaatccttaagagagtagttctctgtyacccttgactgtgctaatcaagaaatgtaatgtgggatgtgaaaaaaaataaatttactttttttttttttttttttgagacagagccttgctctgttgcccaggctggagtgcagtggcggatcttggctcactgcaacctccatcacccgggttcaagcgattctcccgctgcagcctcccaagtagctgggattacaggcacctgccaccaggcctggctaatttttgtatttttagtagagacagggtttcaccatgttggccaggctggtcttgaactcttgccctcaagtgatccacctgcctcggcctcccaaagtgctaggattacaaatgtgagccaccgggcccagccgacttttttagaagactaatttcagatattcaaagaagaaaattcaaattccatgaatacagacttttttttttgtttktttttttttttgagacagagtttcactctgttgcccaagatggartacagtggtgcgatcaccgttcactgcaacctctgcttcccgagtttaagcgattctcatgcctcagcctcccaagcatctgggactacaggtacccaacaccacgcccagctaattttttgtatatttagcagagacgaggtttcaccattttggccaggcgggtcttgaactcctggcttcaagtgatcactttggcctcccaaagtgctgggattacaagcatgagccaaagcgcccagcctagactttatttcaatggcaaaatagttcaggagtcttagaaagtgcttacagtcaatcaaccagagaggaataaaggaggaattttctaagggtactggggagtttcccgtgacctcaggcgtgaaaaagacatttaccgaagatggaaaataggatgccaaatcaaaagtaactggaagagagtagcatggaccactaagaayaccaacaggaaagattaacccttgmatgagagtagactttatagaaatgttaaggagaccaggaaggactgttttggttagatgytgacaacaagaagaataaaaaagatttgggttttctccccagtctactggcatggtggcagcagacaacagaacacctaagtactttgttctgatttggattttacatctcctatgttagcaaaatgattgtctgactggaaatggcagaatgaatatctgtaagacttaaagctcaagaccagtgaaggcatttaggagaagtttcaggtgttctaacasaatcatatgccttggcctgcgtgtgttgtgtttcaagggagaggccagattaaagcagtgttwgaggatttgtagcaaatgtaagggacctggaaataaacacgtgggttcctgttcttccasaggtggagtctgtcctctgttgacattgatcctgaacaaaatttttacttaatcaatggktactgagcatttttaaaagaaactaattgaccgggcacagtggctgacgcctgtaatcccagcactttgggaggccaaggcaagtggatcacctgaagtcaggagttcaagaccagcctggccaatatggtgaaaccccgtctctactaaaaatacaaaattagctgggcatggtggcataactagtgaccactacactacagtatcagttcagaaagaaagcaagacctatactagacaggcagcatcagaaggatgctggcaggaggtacctacagtagtcattattatagcaaatttattatataccaggtactgttttggatgttttacatwggccaactagcttaatgctcctaaccaattattaggtactattcccwttttacagatgtggaagcatgggcataaagagattaaggaacttgcccacagagctagtaaatgggagagctgaaatttgaatccagatgacctagcttcaaagtctgcttctctagctagcaaatgtgctttactgcctctcttagtgagcaagatggagatggactgatggcaatccagttaggtgaaataaaaacctgrcttactactgaaagaatcaggcagactgaagagaggtctgtacttatatgccatgtatctctatccctaactttgttcctttcagtaccttaacgtcagggtgctgatggcatggtgataaaatttgtgagtgacccaagcctgggaggaatttgtggaattaactgattgatttaatcagagtccagataaatcctgactgactggaatggtgaatcatcttttacaaagaagaggcacaatcctatactcagctgcagaaaaatcagtgataaagtgtggaatgagggagaagtgatacaaggacagtgttcgttgatgggaaactcagtgtgaatcaacagtataatgtgggtgccagtatagctagtgtcatgggttctgcagtttgtctccaaaatgagcaagttggtagccctgctcattttcgggctgatgaggctttatctggagttttgtttgattccgagcaccaaaaaatgaagaaatttgaaatcatactacatgaggaattatactatttgaggaatactgtatgaggactggcttattctaaatctttatatttacagtttctagtagactgtacatatggtgaatacacagacctccatctagcaataccaaatggaataatagttatggtgctatcgcatcataatttacataaccagacccctttagttgagcatttggattatttagccttgttcattattttgtaagtattcagtatggtatatgctttttttaagtgaagataataaaatgtatttagaaaatagcaacttaggctgggtgcagtggctcacacctgtaatcccagcactttgggaggccaaggtgggaggatcacttgagaccagaagttcaagactagcctgggcaacatagtgaagccccatctctacaaaaaatttaaaatttagccaggcatagatgcatgtacctgtagtcccagctgctcaggagactgaggtgagaggattgtctgagcccaggtgtgtgtggttactgtgagctatgatagcaccactgcactccagcctgggtggcagccagaccctgtctcttaaaaaagaaaaaagcaacttaaatccctaaaatagtgtaaaataattgaagataaaagaagttggagtcattaattttagagaaaaccttaaaaatttagttttttgaaatacagcaaatctagctaggcatggtggtgtgtgcctgtagtcctagctactcaggaggctgaggcaggaggatcacttgagcccaggagttggaggctgcagccaactatgatcatgccactgcactccagcatgggtgacagagtgagaccccatctcttaaaaaaaaaataattaaaaaaataaaaaaatagcaaatctgaattaactggacttcttaatgaactctatgcgtggagtgtgtgtatgtgtgttttgagaaagactatcagaaaatatagtcgaccttccatatctatggattctgcatctaagaattcaaccaactgtggattgaaattatttgggaaaaaaaaagacaaataacaacattaaaaaatgatacagataaaaagaatgcaggatgacagctacttacatagcatttacattgtattaggtattataaataatgtaaagattatctaaagtatatgggaggatctgcataggttatatacaaatactatgccattttatatcaagcgacttgagcatccttagatattggtgtctgtgaggggttctacaaccagtcccccatgtatgcaaaactaggtacataccacagtccatttttagaaagattgattagtaactaaaggatgactgtacacaattcatcagttccaggcagctataagaaaacaatctagccggacacagtggctcacacctgtaatcccagcactttggggaagctaaggcgggcagatcrtgaggtcaggagtttgacaccagcctgaccaacatggtgaaaccctgtctctactaaaaatacaaaaattagcccggtgtaggtgcctgtaatcccagctactcaggaggctgaggcaggagaatcacttgaacccaggaggcagaggttgcagtgagccgagatcatgccattgcactccagcctgggtgacagagygagactctgtctcaaaaaccaaacaaacaaaaaacaacagaaaaacaatctatgagcgctgcagttcaacagaaggtaagtgcaaatggaggctagcagagaaaaaggggtamacaggaaaatgagggaragtgagaggtagtgaagaatatttgagactaagataaatgatgggggaagaaaagtgaacraagagaaataaaatcaatcrtgcttgtaagtttaacatcaggaagttatacaaagtagaaagtctttggggtctgttttgagtctagacagatctagtcctatttcctatacattgtccayatatgtagaaatcactgaatctaattcctcattttcatggtgagggaatggataccccgagaggataaatgactaaatgctctttgttactgtccttctcatagagttattgctcagaaacattgcagagttctggattataaagtagcaacgatcattatgcatacacaaatgtatttaagaaatatcctcacactgaggttgaaacaggtttatgctgcttatacatttagttgttattataatagaagataaaattatccagaaccccccttttttttttagacagagtcttgctctgtygcccaggctggagtacagtggtacgatcttggcttactgcagcctccgcctccctagttcaagcaattctcctgcctcagccttccctgtatttaggattacaggcgcatgccacgacgcctgactaagttttgtatttttagtagagatggggtttcaccatgttggccaggccggtctcgaactcctaacctcgtgatccaaccccctcggcctcccaaagtgctgggattacaggcgtgagccactgtttccggccagttatccagaactgtttagttaactagcattcaagtttatgaagatttttgtgtagatgtaatgcttgcttctgccaaggaataagaatgttgtaatccaccatcttttattctggcttttaggcagctgttgaggtaaacaaaytaagtttaatgctcgaagatagtgtattcctcagaactaacacatttgattttccataggtttattttcctttacctgttctaatttaactttttgtaaaatgccacagtccatttttagaaagattaagggatatwtcrttattatagataagtttctaggtttctttcaaacttgatatacctaatataaaagttcagattatttttcctctttatttttcactttttattcagccaactgtgatttctagaattttgattttcagcttctgaaccccagaatttctgaagatgattaatgacctccgactatactaaaagttttgaaaaatttttttaaagtaaagaatcctgttgtaatgtgaacggtgtctccctaatttatgtattttcagtttgcattttcatgaagtgctcaaaatgggacatgtgaaattctgagagtagtagtaagaaacatgggagagtggtaggtagattgccttcctgaccatgtgacagagtaaaaacacgtttcatacatttttttttttttttgagacggagtttcgctcttgttgtccaggctggagtgcaatggcatcatctcggctcaccacaacctccacctcstgggttcaagcgattctcctacctcagcatcctgaactagctgggattacaggcatgcgccaccacacccagctaattttgtgtttttagtagagacagggtttctgcatgttggtcgggctggtcttgaactcctgacctcaggtgatccgcccgccttgacctcccaaagcgccgagattacaggcgtgagccactgcacccagccacatctcatgcattcttttgctcgctcatttattgtcaccatatgcctttgtttctatatattcaagctaaatcaaggtgctattagaatctcgggaagctgccgctgaccacagtcagaacttgcagtttctttagttagaattgccataggaccactgctcaagacttccagatctaacctagccatatccaactcatcattagaatatttaaatcatgaatgttgmacaaccaatattttmacwatttattgcatagagctactaataatattaaataaaactatggaaaaaaagsacattttactttgtgccaggtatgcttctaagcatagttctacatcttaacttctagtccctgtctacatattttcccttatgtgtagccttagttatactattttgtattcttttctgttttaaaatatatataaactctttcctgttcttttacataagataaataaacttaattttttagctgcatagtattttctcatgttaatgtattgtagtttactaagtcataactttatttttatttaatttgtgaacaataaaagaaataaaactcttatgatacaggttaatctctttctcactcattcttaatctttgctttaccaacctacccttaaagatagctggaagtggaaatgcctctccagtggtttgtccattgggattgggcttctgtttatcttgagctgccaacatttagcccagccgctgggggtggtctgttatcctttgtttccccaggccatttaagcttatccaggaaatgctttagtttgccttttttttttcctgttaaccattttattgagatatgatttacatactacatagttcatccatttaaagtgtactcatttgccctcttttkttgttgttgttgttgttattgaggcagagtctcgttctgtcccccaggctggggtgcagcagtgtgatcatcgctcactgtaaccttgaactcctagactcaggcaatcctcctgcctcaccctcctgagcagctggggctgtcagcatgtaccaccatgcccagctaatgttttaaaatttttttgtggaggtggcgatcttgctatattgccccggccactcttgaattcctggcctcaagtgatcctcccgccttgccctcccaaagcactaggattacagacataagccmccgtgcctggcctcatttccctttttaatctgctttctgagcttcctgttctctttcaatgaatatcatagagaatgaaaactgattagtatagtatcttgcmgtagaaaacatgactttcgctgggcgcggtggctcatgcctataatcccagcactttgggaggctgaggcgggtggatcgcgaggtcaggagattgagmccatcctggctaacrcggtgaaaccctgtctctactaaaaatataaaaaaaaattagctgggtgtggtggtgggggcgcctgtagtcccagctactcgggaggctgaggcaggagaatggcgtgaacccgggaggcggagcttgcagtgagccaagatcgcgccaccacactccagcctgggcgacagggcgagactccgtctcaaaaaaaaaaaaaaaaaaagaaaaagaaaaagaamacatgactttcctctccaaatagtaaagcaaacttttccattttattttctactgtttttcttctcctgcctatttaatggcattatttggcatttgctgtaacttgagtttcatcaaatatgtgtttacttctctggttttakgctaacagcaacaccatgagatagtggtttaaggccatgagaagtattttttttaattgttttctttgaaagcccacattgtttcctttgaacagaatactttgaacaaaatttaaatcgtgttcagaagagaggtttagaggttttttccttcataaattcaacacatgtttacaaaatatccatttcatgttyctctttagtgactgaatctattttgtgttgctgtttcagaatgccatagactgggcaattaataaacagtagaggtttttttggctcctacttctggagcctgggaagtccaagatggaggggctacatctgatgaggggcttcttgctgcgtcataaaatggcagaaggaatcacacagtgaggcagcacttgtgacagagagataggaaagggagttgaactcatccactcatcgtgttatcaggaaccctctcytgtgataatagcattaacccactcctgaaggcagagccctcctcttgacctaatcaccattttttttttcttttgagacagaatcttgctctgtcacccaggctggagtgcagtggtacaatctcagctcacttaaacctccaccttccaggctcaaacagttctcctgcctcagcctcccaagtatctgggacttcaggtgcatgccactgtgcccggctaatttttatatttttagtagaggcggggttttgccatgttggtcaggctggttataaactcctgacctcaggtgatctaccctcctcggcctcccaaagtgctgggtttacaggtgtgagccactgtgcccggccttgtcacctcataaaggtcctacctctcaacacttgcattggggatttagttttcaacacgtgaactttgggggacacattcaaaccatagcagtggcaaaaaaaaaaagccctagccccaacaaaacaaaaataccaccatcaataaaaatcaaatataggcctgggtgcagtggctcacatctgtaatcctagcacttggggaaactgagatgggcagatctcttgagctcagaagttcaagaccagcctggccaacatggcaaaaccctgtctagacaaaaattacaaaaattagccaggcattggggctygctcctgtagtcccagctacttgggaggctgaggtgggaggatcacttgagatctcccacctcagaagtaacagtgaaccaagatcacactactgcactccaacctgggtgacagagggagaccctgtctccccacacacacacacacacacacacacacaaactaatgaaaaaataagtaaacaggcaaataaaaataaactaaaagagaatcttaattagattggaggggatcttcaggtgattaaatactgaaggaaagtaggggcacaaattgtatttggggacatcttaaccctgtatgggttgatagacctttcaagtctgtctactagaaaaytccctcaaatcttatttcagagaaagtatgggctgacttgacaggactratcagttttatcagtgacacatcttatcayttaaacrgtgcaagagttaatggttggttattaagcactcagtaaaggttggtgaacatgtacatacaggactagatctctcctctgtaatccactctaaataaatacttcagtctggttacaaaatacttaatactgtactgaagatttttgtacagctgatcatttggatttacatttgggtaattttatcattacatctcatgcttcattattctttcagctattcccttcagcaagctcaagctttttatacgtttccatttcaacaactgatggctgaagctcctaatatggcagttgtgaatgaacagcaaatgccagaagaagttccagccccagctcctgctcaggaaccagtgcaaggtagtttcaccrtgagagcttagaaagttcaacatcggatcagccagcttatttgagaaagggtttcatggtgaattttagctctattttagtgttaaaaagtcaaatccactttttaagtacttagtatgtgctaagcactgataggttctggggaataaaagaacatgggtcctgcccaaaaatatctcataatctagtagagaaaagtaataagtaaatacacgttacagctcagcacagtttgtagtgaagaggggcatagaatgaatgccctgaaagcttatggggttggcttctaactcagactgatggctcagaggcygcttcccagagcagagaaataacaccagggctctgaaactccaacaatgtggaggcttcatcccgataaagatcagagtagggacatgtccaggctgagggagctayacaggctgggtacagacacacacaagcatggcatggccagaaacagagcaattctgtgtccttggagtctgggatataacaaggaaatggtgagagrtgaggctggatggggacagttgaaacttgttttttaatcccaaagaatttatattctatcatgaaggcaatagggagctgttgagagaatgtaagcaagggatgacttacttgactggtgctttacaaattagcctggaaatattagagaagatagattggttggtagacaacaagtcggaacttggaggcaggccgggcacagtggctcatacctgtaatccctgcactttggaaggctgaggcgggtagatcacytgaggtcaggagttcatgaccagcctggcgaacatggcaaaaccctgcctcacacaaattagccgggcatggtggcgcacacctgtgattccagctactggggaggctgaggcacgagaattgcttgaatcctggaggcggaggctgagaggctgcagtgagccaagattgcaccactgcactccagctgggcaatagtgcgagactctgtctcaaaaacaaaaacaaaaacaaaaacaaaaacaaaacttggagtcaaggagtggattagatggattagagacactgtttgaataatctaggggagcactgaggaggacctgaaggggtggagaaagaattaggaaacacttaggaggtagaattacctagccatggctaatgggtttcatgtgtttggggggagcatggcaggatagtgggggagaaaggggagtccagaagtaactaccaggtttctggcattggcatttggttggaggaggbgccactcaccaagacagagaattagaagaaaataataggttccaggggtgggagagtggttggagagaagttaatgattttctccagtgtaacagtattttatgagaaatgtgctcagggttttggtttatgattgcaggaacacatctaataactctgcctccgcattaggacttccccagctacatgccagtgatggtggatctgttggcatagggagtggctaagacaatgtgaggcagaagagaggagggactgactgcctgtatcctgcgaggcttgattggggaaacgccaaagaggagtagaatagggtagaagcctgagtagttaggagaaatgttaaataattaagggtaagaaaatcagggcttcctgttgggtaactataggtcagtggttttcaatcaagggtgattttgccctcccaagggacatttgacattgtctgaagacacttttgatgatcaagactggcaggttactactggcatctagtgggtagagatcaggggtgctattaaacattctgtaatgtgcagtacagccacccacaacaaaaaattatgcaacctaaaatgtcaatagtgtggaggctgagaaactgctttacgtcctgaggttggatccctcctcttgccttttgaaaaatactgccagcccagagatgtcatcctgggcacccctaaattcccctcttcaactatgtatggaacagaatatacacctcatctctaaaacaagcccacaagccattgtgtttttcttttttctttctttttttttttttttttttggacagagtcttgctctgttgcccaggctggaatgcagaggcatgatctcagctcactgcaacctccacctcttgggttcaagcaattctcctgcctcagcttcccgagtagttggaattacaggtgcacgacaccatgcctggctaatttttgtatttttagtaaagacgggggtttcaccatgttggccaggctggtcttgaactcctgacgtcaggtgatctgcctgccttggcctcccaaagtgctgggattacagacatgagccaccatacctggcccatttgtggttttctactggggaagttgagttaaaatgtttcccttccttcctgtttctctatttttctgttcttatttaattatttatgtatttacatttagaatttatataaaatgatatgtagatactttgtatccttgaggaggttaagatgccaagtaatactgtgtcgaaaataatagtctatgattattcttcccacgaacagctagcaggggaaggagagtggcatggggggttgcacgaacccagttmtagggagaaagaaagggaagatattgcagaggagactcatgttgggactgtaagagcttaattttggggagacaggtacaaaaggtgctagttgggtaacttttctgggaaagctgctaaagtttctaagttaagattttctgcatttctggaaattatttntatttcagaggctccaaaaggaagaaaaagaaaacccagaacaacagaaccaaaacaaccagtggaacccaaaaaacctgttgagtcaaaaaaatctggcaagtctgcaaaatcaaaagaaaaacaagaaaaaattacagacacatttaaagtaaaaagaaaagtagaccgttttaatggtgtttcagaagctgaacttctgaccaagactctccccgatattttgaccttcaatctggacattgtcattgtaagatctttgtcctcgttggattttataagtagtattgggggatcagctttacttaacagttgtccttgcaaatagcattttgctgaaaaggaccatttctamgaatccttttggtggtaaatggtgtcagcttcatgaggttgtgttatatgagagtgtttaagagggtgggctccaaatttagactgtctgggttcaaatcctgtcacaagtataatcttggataagtcttattaacctttctaaacaccggttttctcattgataaaccaggggtgataataccaccccccgatagggttgcaagtaaatgagagaatccatgtgaatcacttcaactgaatgatgcctgtggagacctgatacatggcagcactaattttaagctcttatttttctcagtaactgtaagaaacatcagcatgtgaacaattgtgtaggtgatgtggagcgagcttcttgttgaaagttgagaatcagaattgtggctggacatgggctcagattgattgttccaggacctgtctttccagactcaaagcagcccagttggtgagggtgcgaggcctgggatcataaaggagtcaarctggttttttaaaataacascaaaacttttaaaataaagaaaatctctttcccatatatgaaatactytgttcasatcaagagtagtaattgataaatgatattgcttatgatgctgaattaaatttgtattttaatcaactcaattttgtccaccactcctccatakaaacgctaaggcttaggtcctgctttttaagatgaaatgtctaattgttttgttttatagattggcataaacccgggactaatggctgcttacaaagggcatcattaccctggacctggaaaccatttttgtaagtggttaccttttaaattaatttacttttaaattaggtatctttgttaacaggttttttcagaaaaaccaattgtgtttttaaaaagaaagagactgtraatacacattcgtgtttcatgttctgtgtgtgtgtctgtacgtgaaaataagagagtttgaaatgatatgttactgtkaacattttagtctatgagaatggagggatgtgaataagagtactttctcttttgtttgaattgtttctaatgagttgtactactttttttttttttttttttttttttgagawggagtttcgctctttttgcscaractggagtgcaatggcgcgatctcggctcaccacaatctccacctcccaggttcaagtgattctcctgcctcagcctccctagtagctgggattacaggcatgtaccaccacgcctggktaattttgtatttttagtagagacggggtgtctccatgttggtcaggctggtctcgaactcccggcctcaggtgatctgcccacctcagcctcccaaagtgctgggattacaggcgtgagctacaacgcccagccaagttgtattactttttaaaaatgattttttaaaagttgttatctataggcatagtaacgatagtatagtacatctttgtggcagtgcagacataatactaactttcccagatttctggtgattattttctagcagagcataaaatagtagtaaagactcatatttttagagtaagttttaaaaccaagtgttggctggatctggtggctcacacctgtaatcccaacactttgggaggccaaagcaggaggatcacttgaggccaggagtttgagactagcctgtacaacataccaagatctcatttctacaaaaaaataaataaaaaattagctgagtgctgtggtgcacacctgtagttccagctactacggaggctgggttgggaaaattgcttgagcctgagaggttgaggctgcagttagccataattactccactgcactccagcctaggtgacagaactagaccctgtatcacaaaaacaaacaagaaaacaaacaaaaaacaagcgtaactactgttgcattgccttctctatataagttgtcttgtatataaatcatcttattttatactgcctaatagatcagtgtatgcagtatacgctcaggaaattgattatctaatagtaacattcaaaacatttagggcaactgatagtaatgtggttttggaactaataataacatattgtccctattattttaaaaaattcctttttaagggaagtttggacttttgactttcttcactgtcaaggtgtttgaatgttgttagtctagtgctgtatgtttacgtgtgaggtggtggtatcaccaattgtaaagcaaaatagtctcaaagtttcctaaactgagttgctatatattcttgggcaggcatttgcctcaaccccctgtgaaaaggagataataatagtatcttgcaagataattatgatgattaaatccargcgctgtggctcacacctgtaatcccagcaattttggaggctgaggtgggaagatcacttgagcccaggaattcaagaccagcctgggcaacatggtgaaaccctgtctacaaacaatacaaaaattagctgggcgtggtggtgtgcatctggggttccagccactcaggaggctgaagtgggaggattgcttgagcctcggtggtcgaggctgcactgagccatgatcgtgccactacactctagcctgggtgacagagcgagaccctgtctaaaaaaaaataaataactgaattttcattttacagggaagtgtttgtttatgtcagggctcagtgaggtccagctgaaccatatggatgatcacactctaccagggaagtatggtattggatttaccaacatggtggaaaggaccacgcccggcagcaaagatctctccaggtaagtacacagcatttgcttttatgggttggaaccttgagtatgctggtgccccaaatattctaggaacatcatatgtatmtagttcaagctgagctcaacaaatgtacaatatgctctttcattgaaagctgtctgaatttagcatattataaatattgtcatatttatatttttgactactttttaattcaattttagtaaagaatttcgtgaaggaggacgtattctagtacagaaattacagaaatatcagccacgaatagcagtgtttaatggaaaatgtaagatttacttttaaattttttttttctttgctaacattatgggcaatgtaaatatgtttgtatttcattttaggtatttatgaaatttttagtaaagaagtttttggagtaaaggttaagaacttggaatttgggcttcagccccataagattccagacacagaaactgtaagtccctaaaattgaatttgtaaatcagctaaatgtgaatttttttctagataatttccttatttgtcctatccattgtgatttataccatgcaaaacaattacactgtattttgttgaataatacctatacatcagctttaactaatagttgtaaattaattcaaatactattagggtttattagaaagaaaaacatttgtcagctaaatgtcttgatgttgttattcagtgaaaatattgagaggaactggctcatatactacattcagaatacatttaatggcatgtagttgtcaaattcaaatggtttagccctcgtactgttgtgaaacaaacatggaaacacagacatgatcctgattaggaaaaccagttgccccatttatatatcttagctcaacttcattttagagccatataaataatacaacccagacaagcctccagccaacctaactggcattcaatactgttgtcttatacacaaagtcatcatgaaataacagtgtttttcaaattgtcctctctacagagcttctgcaggcatttggttccaattttgcttcttagttttaggttttatttacaacttttaaagaacaacacagtgcacagatttacatgttgtatatacaacatcttaactgatggagaarctaatttgctgccaggtttttgtggaaacctaaaaatgtttctgccacctaaatatatttaaatttctcctttaaaattgtttttgttcataatttcttataaatatgcaattgatgagttttattatagcattggtttttgcttaaataaaggcccacctttgtctgcttggttaaaatggtacaaattcactacctgtagtgaattgtagagaaattcctgtagagtactgtgtcattctctgttacatgccatttggaggccgggcgtggtggctcatgcctataatcccagcactttgggaggccgaggcaggcggatcacctgaggttaggagttcgagaccagcctggccaacatggtgaaaccccatctccactaaaaaatacaaaaattagccaggcatggtggcatgcrctgtaatcccagctacgtaggaggctgaggcagaagaatcgcttgaacccaggaggcagctcattaggcggaggctcattatttttcacttcctgacttggtaataagtcagtattacaaattcaaccttaaaagcaactacttttattgatttttacatatatttatatgtagttaagtatcaagttattaacccaaataaagacaaatattctaatctcaatgagtgaattcaatagaattataagatttctgaaattataaaatgttgtgattctagctctgctatgttatgccatcatccagtgcaagatgtgctcagtttcctcgagcccaagacaaagttcattactacataaaactgaaggacttaagagatcagttgaaaggcattgaacgaaatatggacgttcaagaggtgcaatatacatttgacctacagcttgcccaaggtatgttactgtcctcattccttttattcattttgtgtgtgtatatatacacatatatacttacwtatatatacacatatacatatatacatatacacatatacatatgtgtgcacatatatgcacaygtgtatatatacatgtgtatatatacatatatacacataagtatgtatgtctatatacatatatgtgtgtatacacttgtgtgcgtatacatatgtgtgtgtctatatatagacacatacacacacacacayacacacacacacacacacacacacacayattacagaaagtatcttatggatttaaaagcaggaaaaaagaaaacaattatattcgcagccagagtgctctgataatgaatattagtcactgttaaaatctccttttaccaaggtcttccctctactctggcacttctgcagayaattcacctgcagagtgccagagcagagggatgtaagaaatattgtaccctacgtaaagttgaatgtaagcggtttttacagttcttatgtgtttatttagtacatgctataagtttaaaagattaatagagatgtatctcagtgtatatgaatattcaagaaaaagaattgttcatgatttctgaataaasctacttttaaaattgttgtacaaaatcagatttaaatcytttttaccttcctcacagaggatgcaaagaagatggctgttaaggaagaaaaatatgatccaggttatgaggcagcatatggtggtgcttacggagaaaatccatgcagcagtgaaccttgtggcttctcttcaaatgggctaagtatggttccctccacatgtgtattcctttcaaagacggtttggtcaggattggggggaaaattttaatagaaggagagtaaattattgaagaatgggaatgataatatgaaattttatttagtgactaatagtgaaaaattgatggttatttcacgttgaattacacagacttttacagtacattttcttttttgtttgtttgtttttgagacagattctcgctgtgtcacccaggctagagtgcagtggctcgatcttggctcactgcaagctccccctcctgggttcacaccattctcctgcctcagcctcccgagtagctgggactacaggcatccgccacgatgcctggctaattttttttgtatttttaatagagacagggtttcaccgtgttagccaggttggtctcgatctcctgacctcgtgatctgcccaccttggcctccaaaagtgctgggattacaggcatgagccaccgcacccggcctacagtgcattttctttaagtcatgaactctaggccatcctagttgcattttcctcctttaataacaaatgagtcctgtatctgaagaacagaaacttaacagttgtattccggaagcttgcttaactattttaataataattctccttcactagactgttaaaatctcctactttgatcatttaaaacttccaggccgggcatggtggttcacgcctgtaatcccagcagtttgagaggctgaggtgggtggatcatttgaggtcaggagttcgagaccagcctggccaacatggtgaaaccccatctctactaaaatatacaaaaattagcatggtggcaggtataatcctagctacttgggaggctgaggcaggagtatcattatatataatatatatgcctctcctcgatcccgggaggcagaggctgtagtgagccgaaatcacaccactggactccagcctgggtgacagaatgagacaccgtctcaaaaagaaaaaaaaaaacttcaaataagctgatacggtggctcacacctgtaatcccagtgctttgagaggctaggatgggaggatcactcaagcccaggagtytgaggctgcaaagagctgtgatcatgccactgcattccagcctgggcgatagagtaagacccagtctctactttaaaaaaagcaaatatttctaaatggcataaactaactttgtttttcttttctggcagttgagagcvtggagttaagaggagaatcagctttcagtggcattcctaatgggcagtggatgacccagtcatttacagaccaaattccttcctttagtaatcactgtggaacacaagaacaggaagaagaaagccatgcttaagaatggtgcttctcagctctgcttaaatgctgcagttttaatgcagttgtcaacaagtagaacctcagtttgctaactgaagtgttttattagtattttactctagtggtgtaattgtaatgtagaacagttgtgtggtagtgtgaaccgtatgaacctaagtagtttggaagaaaaagtagggtttttgtatactagcttttgtatttgaattaattatcattccagctttttatatactatatttcatttatgaagaaattgattttcttttgggagtcacttttaatctgtaattttaaaatacaagtctgaatatttatagttgattcttaactgtgcataaacctagatataccattatcccttttatacctaagaagggcatgctaataattaccactgtcaaagaggcaaaggtgttgatttttgtatatgaagttaagcctcagtggagtctcatttgttagtttttagtggtaactaagsgtaaactcagggttccctgagctatatgcacactcagacctctttgctttaccagtggtgtttgtgagttgctcagtagtaaaaactggcccttacctgacagagccctggctttgacctgctcagccctgtgtgttaatcctctagtagccarttaactactctggggtggcaggttccagagaatgcagtagaccttttgccactcatctgtgttttacttgagacatgtaaatatgatagggaaggaactgaatttctccattcatatttataaccattctagttttatcttccttggctttaagagtgtgccatggaaagtgataagaaatgaacttctaggctaagcaaaaagatgctggagatatttgatactctcatttaaactggtgctttatgtacatgagatgtactaaaataagtaatatagaatttttcttgctaggtaaatccagtaagccaataattttaaagattctttatctgcatcattgctgtttgttactataaattaaatgaacctcatggaaaggttgaggtgtatacctttgtgattttctaatgagttttccatggtgctacaaataatccagactaccaggtctggtagatattaaagctgggtactaagaaatgttatttgcatcctctcagttactcctgaatattctgatttcatacgtacccagggagcatgctgttttgtcaatcaatataaaatatttatgaggtctcccccacccccaggaggttatatgattgctcttctctttataataagagaaacaaattcttattgtgaatcttaacatgctttttagctgtggctatgatggattttattttttcctaggtcaagctgtgtaaaagtcatttatgttatttaaatgatgtactgtactgctgtttacatggacgttttgtgcgggtgctttgaagtgccttgcatcagggattaggagcaattaaattattttttcacgggactgtgtaaagcatgtaactaggtattgctttggtatataactattgtagctttacaagagattgttttatttgaatggggaaaataccctttaaattatgacrgacatccactagagatgggtttgaggattttccaagcgtgtaataatgatgtttttcctaacatgacagatgagtagtaaatgttgatatatcctrtacatgacagtgtgagactttttcattaaataatattgaaagattttaaaattcatttgaaagtctgatggcttttacaataaaagatattaagaattgttatccttaacttacgggctttttctatagcaagactgagtggtattctttcccctttaaacctgaggtcagtttaccttctattatatttaacatgtagaatagtaacatgataaaaatcataaaaatgatgaatattttatttttcagacgtccatattttaaatgtaatagttttataaaagaaaaggttggcaacctgttaaggagatcttcatgtgaaaaatacatgtagaagttttaaaaatttgtggatataattgtcattcagaattaagcaggttgattgctgttatctagatgggtctcttcctttatgtttttcagtcacataatcttgatttccatagttatcacatgtacttaaagaagttaatcaatgcctatatggtccaaggtataatttgcacacagtagtttttggtttttatattgtggatcatatgtatcaaaggtaatattcataaagaacaatgttatagttggctacaaagggacaattccacatttctatacagggaatattttaagggtagagttatatcagctatggtgattgagtttaaatatccctgcagggtcaggaacaaaccagctttcccataagtcgttgtgaacactagggaagtcccaaggtttatgtcttccattccagtggagtaatttagcttcctgcagaaaatgctccgaatatctggcatctggattccagccttcattgtgtatagagaaaaaataataggcttgttagagaataacatttttgtattataaattgaatacaagttcatagtttaaaaaaaggtaaacaaataaaaaggttatacagtgaattttctacccaccccaggtctccaaatcaaccactgttagtctcttgtgaatccttctagtagtgttatagcattgtttgacctgtatgcatgtatatgtatatttaaagacagaagacaaaatagagcatactgctaccttgcctttaaaaaaaaattattttgtttctttatgtggacattgccttttaaaattactgtcttgggaaactttccacagcagtacatgtggatttaccaaattatttttagtgactgtatagaatgatactatttattgaccaagttccttattaaggacatttagattgtttctatcctattattagcataaacacagcaatgagcagccctctatgtatgtctagtgtatgtgtacaaatatatatatatatatatatatatatatatatatatatatatatatatatatatatgtaggataaaatattgtgggtggaattgctagattgaaggttgtgtgccttttcaattttgatagagattgccgcattgtcccccaagaagttctattaatttccctcccacccaagagtttataggggttcttttttctctgcatttcacctccttaatgaaaaatggcaacatttgcttttgaacagtcttgtctaaatataaaatgtgactaagatctactttttaaacaaacagctatctatctccacctgaacattactcccctcataagtcatgacttcgagagactatgcatttaccctaacagtgccattgcttagaatactctttagaatacctattctagaactacattaaggtggcgtgaatgtacaattttttaaaaatctctatagtgttcgactttctttccatgaaaaggaatttgatatatatattctttaaacagctgaaagtccattgaattacgagagggttgatttgctagggttatgttattctattgtatgacgttaacaacaacacaacctggcttctgttactaataaacatagctgtgacggcagctgcagaagagaaactagttgtttgaaactatcgcagcataactggaataattatcaatcatcagagtctatgcaaaggaaatattcatttgggaagaggcaccttcccatgaaaagtctctactaagtaggacatcctcacctctcagcttcgtaactgaagggctatgcagaactacctcagaggggcttgcagtttgggtgatgaaattgcttttagctaaatatattttgtaaatttaaaaaatcttaagcctgcctgtttagacccaaacttaatgcccattagtgttatgttgcccttctgcctccagaacatcctgaaacctcatttttcaaatgatttttgtgtagatttactttgcacaccatccctgattccaaaaccttcagcacagatggaagctctgtcctacaaagaaaaacgacatctttcctttgggaagagtatgtcccttcctacttgtcagtaaagtggatatttctcttttttttcttttgagatggagtctagctctgtcacccagactggagtgcagtggcatgatttctgctcagttcaatctctgcctcccaggtttaggctattctcctgcatcagcctcccgaataactgggattacaggtgtgtgccaccatgcccagctaatttttcatatttttagtagagatggggtttcaccatgttggccaggctggtcttgaactcctgacctcaagtgatccacccgcttcaacctcccaaagtactgggattataggcatgagccatcatgcctggcctaagttgcatgtttcataaaatgtaattctgagtctgtctcaagatcataaaatgccgtaaccttattgatctaagctctgcataactgttcctacacatatttaaaaatagaccttctactttgatgggatctgcacatggaaaggttgatatttgacctaatgttgaacccaacatgactataaatcaaatcagacacaacactaacttccctgtggcactcttttgtgcatatacatgctcaggaaaatcagaggattctgggaatgatgcagaagcaacccacagaatcatcgagagcatacaggaactcagcctccacaattacgtcctttaaaaaaaaaaaaaaaaaaaaaagattatgggacataacaccttgcagggttgttgtgagaattagaaataatattcaccttccttaacagaacctagtccagttcttggcaatgtaatggacacttggtaaatataagtgcatatccattgcctacaattctaagataatccccaaaggtctgaaaacaaaaggttttttaataacttctttggcagtaaaacctagatcccactcagcaccacattacctttttaaaatccaaaccctttctaaacttccaaacatgtctggcccagcggttttggatcagggattgtggccatgtgttagagtggatgtgaatgtgtcctctatgctaggctctatgctaagcaatttacatgtattccgtaacctgccccaaatcatagttgggattccagttcatactctaaaccctacacttgtgtagtgagtaaaagacttagagaactcacagagtacagagtcaactgctttttaaaggataaattttaatggcagctttctgaattcatcctaagccattatgctaatttatttggttttgtccactgtaagttactgcaagagaaaataaaagtgtggcttgacagttcaataaggttttgaagttttgacagtgaaagttctctctctctctctctcttttttttttttttttttgagatagagtttcggtcctgtcgcccaggctggagtgcagtggcgcaatcgtagctcactgcaacctctgccttccaggtccaagcgattctcctgcctcagcctcccgagtagctgggattgcaggtgcctgcccccatgcccagcgaatttttatatttttagcagagacgggtttcaccacgttggtcaggttggtcttgaactcctaacctcaggttatccaccctcctcagcctcccaaagtgctgggattacaagcgtgagccaccacgcccggccgaaagttctctttataatagttcatgtttactaagcacatactatatgctaagcatgaatttgatggctttccataaatctccagaaacacgctcctcaggtagctcagaatatcagctgcacttgctgaatctgagcactgagggtcaagtcatttgtccaaggtcacctggaggatttcaattgaacaacctggtgctgtatgtagcaccctctcctcgctatggtgctcactgggtctataaaatgcacatttgcggccgggcatggtggcttatgccgtaatcctagcactttgggaggccgaaatgggtggatcacctaaggtcaggagtttgagaccagcctggccaacatggtgaaaccccatctgtactaaaaatacagaaattagctgggcgtgatggcacatgcctgtaatcccagctactcgagatgctgaggcaggtgaattgcttgaacccaggaagcggaggttccagtgagccgagatcacgccattgcactccagcctgggcagcagagcgagactctgtctcaaaaatacaaaaataaaatggacatttgcgtttttctaaacagtttttctgaaatacttacccaggtgccttatgtgccacagggggttaattgtggaatatttcccatgaaacacaatcagcattggggaggtggccacccctcctcccagggagctgctatagaggttttccctaagaaatgaaatagaaaaacaacatttggcctggagcccccacaaactcagataaagtcgaatctgatattgtaaatgatgtaagacattatctcactatgtactaagacttatggcctttcattctcccccaaattttcattttgaaaattgtcaaacatacacaaaatagtaagaataccatgaactcctatatacatcacctagagtaacagtgttaatattttgccattttaactcccagggttttaaatagtagacacaggagatcaaattcgaatcctacattatttagaataactttacttgcaaattcaaggttatgatggtattaaaatatccagatacacaagactgctaggcaatacaatgatgggataatagtgcttgtattagacttatttttatcttctctattttaaaactccgataacgaaaaattataaattataaaaataaaccttaaaaagcaaaattgactttatataataatccttaataaaaaaatctatgttaggaggggaaactcaactaagataaatgaagattgtttggtggaaaagattcaagtcacatttttcaacagcttactaggaaaatgtataatcagggactcctcgctccacaggatcttgattcctctgatttatatcttttgaggaaaggttttaattgactgcccccttttctttcttaacattgcctctgtaagaaaatctgacctgagatgactgtgaaatatttctaacccttgaactatgtgtggaaaattaattgaatgattttgtttccaagcatggaaaaaatggtagagaagccttcacgtactccacattcttttgcatccatttctccaattgcttggtgatgcgctggtgcttccattctgtcatgttggcaacaatcacaccaggattgaaagagcaggtgctggggctgatgccaaggtccttgatggccttcttccggtagtccagatagcccatatatgtgttctgtaagggaacaggatgtgcatgcttttgaccagcgaatcttttgtttctggaaaatgatcattttcttgaaacccttgtgcagtatctttgggtttcctcctgtgtcactggccactgggtagtttgttgtttttgttttgttttgctggtttccctcatttctccaacctctaaatgctgaatgccctaagtctgagtgcagcactagtgcctttctctagcaataactccataaacagccttgtccagtctcatggctctaaataccacccatctgacagccctgacctctcctctggacttccaactcctgctacatctgccatccaaatgtctcctttcagatgcttagtaaaggcagctccaacttacatcccaaaattgatcccaatcctatcccaaacctgcttccctgcacctgccccacctcagtcagtggcaactctatccttctagttacttgggcaaaaaacctggggtcattaggtcctccttgactccttttttctcactctcttctcatccaaatatttcagcaaatggtgtaggtcccatcttcaaaatgctggaagccaaccacttctcttgccactactaccacactgctaccttcctgttcaggccataattgccactcaatggatttctgcaagttcctcctaaccagtatccttgcttccactattttccaccccactctgtctctaggtcactcatctcctctaagctcctccaatagcttcccatctcattcacagaaacagccagatttcctaaaatggcctgccataccctatatcatctgaccctccaatacctttccaactcctgttattctcctcttgatccctcagcaacagcgaccacctttaatgaaccagactcacccctgcctcaagatctttacacttgttcttcccgcttcctggagggtttcccctctaaccatctgcacaggtggttccctcaattctttcaagtttaggttcaaacagcacaatctcagtggagccttccctgattactgtatttaaaatacagccctgcctccaccccaatcctctgttaaatattttacttgtttactgtctgtctgttcccactagaatgtgaaatacacaaaagcaggagttttcgttttgctcactatattactagtacctaaaacagtgtcaggcacagagtaagcactcaataagtcattgttgaatgaatgttgtacagggcaggacatacacattctttcacccata

SEQ ID NO: 94630 - DNA, 13866 bp, Homo sapiens
cctaatgattactcacgttgagcatctttttgtgtgtttatttaccatccacatgtggcgaaatgtctgtttaaatcttttgtgcatttttatagaattattttcttatttttgagttttgggagttgtttatatattccgcatacaagtcctgtgttaggcctcagtgctgtggctcatgcctgtaatcccagcactttgagaggttgaggctggcagatcacttgatgtcaggagtgtaagaccagcctggccaacatggtgaaaccctttctctactaaaacacaaaaattaaccaggcgtggtggtgcaggtctgcaatcccagctactcgggaggctgaggcaggagaattgcctgaacctgggaggtggaggttgcagtgagccgagattgtgccactgcactccagcctagacaacagagtgagactttgtcaaaaaaaaaaaaaaaaaaagccctgtgttacgcgatttgcaaatactttcccctggtatgtgacttgtcttttcagtctcttaacaataaattttgcagagcaaaagtatttaattttgatgatgtcaaattcattttatttttttctttttttttgaaacagggttttactccatcacccaggctcaagtacagtggtataatcttggcccactgcaacctccacctcccaggctcaaacgattctcctacctcagcctcccaagcagctgggactacaggtgcacaccactgcacctggctaatttttgtattttttgtagagatggggttttgccatgttgcccaggctggtcttgaactcctgagctcaagtgatctgcctgccttgacttctcaaagtgctgggattacaggcatcagccaccacacctggcctttttttcttttatagatcatgcttttggtatcatatctaataaattttggcctaacctaaggtcatgatgactttctcctatgttttctgggagaattttatagttttggacttaatatttacattcagagttaatttttgtatatatcatgaaatgtagattaaacttaatcttttagcatatggttatccagttgttccaagaccatttgttgagaaagccatttgttgagaccatttgttattccttctgtggaactgatttttttctttaatattttgttccaatttcagggtattcaaaggggacttcaaatctggcaaggagtttgaacctagaggatgacatgtgtcccaaagaagggagcaagtgatccacacaggttttttattatctcctatactttctacaggaagaattacagatatgattagtcatcagtgactaaaaagtgagctacatcatcaaataaagattcaataatgtggccaggtatggtggctcacaactgtaattccagcactttgggaggctgaggctggcggatcacttcaggccaggaatgcaagaccagcctggacaatatggtgaaaccccatctctactaaaaattcaaaaattggctggacgtggtgggccacacctgtaatctcagctactcgggaggctgaggcacaagaatcacttgaacctgcgagaagggggttgcagtgagccgagatcacaccactgccctccagcttgggcgacagagcaagactctgtctcaaaaaaaaaaaaaaaaaattcaataatgttctcagagtactatcaggaccaagcaggcaagaaaagggttgatctaccatgaaaaactttcaaccaaacatttccccaaattctaattcgatctttgctttatattctggagtattttatttgtgctctgaaatcaagaaggctaagacaccctccctctattctcgaaatatacctgttaagactttgtttcccggttttcccaatttacaatgtatctatctatatgcttaatacaataccttggatattcattaggagaagtggtaggcattaagcaaagcataggataggacaggtttgatgaaaaaataaaatttaaccattagataaggattttagatgacaacattcattttactgtaaaatctaaagttaaatattgtcacatttttatggtcattcacttgtttgtgacattttgccaattaccccaggagttggcaactgacttcctctatctcacacaaaaaaagttaatttgccatgaaaaacaatttgtcttgaaaactcaaagtttgttttaaaattaagttgatccttcttaactatggtctttaaaaggaacttctgaacttgacatttgacgggaggctgcagactgcaaaccaggaataataacctttagaaactaacaacatgacagagatagcccgaggaggtaattgagaaaggaaggatatcataggtccccacagtttcatgaaccaaagtgttatgagaatttgctggcagtcatctaggaaaactcttcaacagagatttgattcaactctttaattcactgtaaacaaccagctacaatgttccttttattttcccgggctatagactgaacacccaagagctttgagtgcatggcaatgacccttctcctcttccccttttgcacctggaaaagaaatgggtcaaaacagcacactacttaggatttttctgagatagggtttcaggtaccttttatccatttaggattttaggtgatatgtatgcatctaactttcggggatgatggaagcctagaatggtctttggccatgtggctcctcctcccactccatgaaagaagccatctggtatcacaggagagaacggggcaaagaccagaaggaagctgagctctaagtccctcaggccatccacttcctggacatcctagttatgaaaaccagtaacttcacaatttttccttaaactgttttgaaatgaggttcagtttcttacaaacaaaagtctttacaaataaatttgctgtggccagaatggtgtgtgaatatggggagcagtttgtaggggtcagataataatcatagctatcatttattgcgaatttaatttgcacgcagctccaggctatttaggtacattatctcctttaattctaacacctttcaagtggatgtattactatctccatttttcaaatgaggacattgtggctcggagaggttcagtaacttgctcaaaatcataaatcttgtaaatgatggggctgggattaaaaattagagctctctgacttcaaagcccttaaccacaaagtgctgagctctcaaagggcccttgcggctacaccagaggttaggagaattggggtccagataacagatttcaccgtgtgttgatgaagctttacagctcacaggcaatgctggtcagctctttcctgagtgctcggttactgtaactatgagaccactccagaggcagaggaatagtaaatgctgattcatctgaacagggggttcatctttccccgtccagtgtgttgccaactctgaaatctctttaagatgaaacaagaagctttaggatgcagataatcgcatgccaattgcaaggcacagcagtaatgagccaagaaggtaagttcccgaagctgattattgtaggaaaccttaagccatatggcaggagtggtgtccttgagaagcatgcagtttcaacagaaagtttgctttaaaaaatgatgtgtgtgtgtgcatgtgcgtgtgtgtgtgtgtataattgcataaagatttggcatgcctgaatttcatcctatccttcctttttacaatttcatctcatctctgatggtggcacttcctgggtttcaaaaaacaaaaaaatcccaagtggacaagacacagtttctgactgagggcactaaagtcaagtggaaaatcatgtggaaatccttttccagtacaattagtgtattaaactgtgggccttggagtcagaccacctgggttcaaatcctagctgcacaatgtataagaaccatataagaaccccttcccttggaaacttaagattcctcacttataaaatgtctgtaataccattttacaatcaacatgttaataagtaattcaggcaaaaaacctcaatgaatgctaaagtgatagggggtaaaatgttgttggggtacagaaaattcacattctcaaagtaatcacacttaagatcaacaaaatgaaacaaattgaaatcctgtgccttgaggtgtgacaaatatcaatatgttcctgccagtgatatttaacctgattctatcatggataacgtcatggtcaaatccaaatcatggatcattctgaagacgaactgccctggtctcttcaaatatgtcaatatcatgaaaggaaaaaaaaaaaccacgttgggaactctataagcttgataatgtaacaatgaaatggaaagtgtgaaccttggctgggctcagtggctcacgcctgtaatcccagcactttgggaggctgaggcaggtggatcatgaggtcaagagatcgagaccatcctggccaacatagtgaaacaccatctctactaaaaacacaaaaattagctgggcatggtggcgtgcacctgtagtcccagctacttcggaggctgaggcaggagaatcgcttgaacctggaaggctgaggttgcagtgagccgagattgcaccactgtactccagcctggtgacagagtgagactccatctcaaaaaaaaaagtgtaaaccttgactgcatcctgaaccaaatgtttaaaaagagctacaaagtttatttttgggaaattggggaaatattatggcattaatgttaaatttcctgagagaataaatgtggtatggttatgtaggagtatatcattgatagtaggagacacatacattaatttaggggtgaaaggtcaagaggttcagggttgtttgtgtgtagaaagagagagagtgagaggtactgagacaatgctaatgtggctaaattggttgagccattatactcttcttgcaacttttctataaattaaaacaatttctaaataaaaagttgaggaaatgaaggtaatataaggctttatgaggattaaatgcagtaatacatttacatgcattaagtacttacaacagtacttggcaaacagttggaaccccacttatacaagccattatgatcgtgtgattctagggaaataactccatctctctccgtctcagtttcctcattattatgactgaagcagacaattctattagatctaacattctagaactttatatagttatgccctcaaaaaagtgatgggggttgaaagaatcaacattgtcaaaatgtctataacacccaaagcaatctacagatttaatgtagtccctttcaaaattccaatgacatttttcacaaaaatagaaaaaaaaaatcctaaaatgcatatggaaccgcaaaagcccccaaataactgaagcaattttgagcaggaacaaaactgaaggcatcacatttcctaattttaaattatatttacaaagttatagtaatccaaaaagtatggtactgacataaaaacagacacatagatcaatggaacatagaccaatgggacagaatagagggcccagaaataaatccacgcatatatggtcaactattcttccataaggcacaaagaatacacaatggggaaaggatagtctctttagtaagtggtgctgggaaaactggatattaacaacaaaaaaattggatctttatcatacacaaaaccagctcaaaatgaattacatattaaataagtaattattcatttttattatttattaatttaataataacataattaaatgtgtaagatgtgaaactgtaaaactagaagaaaacagggggaaagctctgtggcattggtcttggcaatgattttttgaatatgacaccaaaagcacagttaacaaaaacaaaaacaaacaagtgggactacatcaaactaaaaagtttctgcactgcaaaggagcaatcaataaaataaaaaagcaacctgtggaatgggagcgattatttacaaaccatatacctgataagaagttaatatccaaaatatataagaaactcatacaactcaatagcaaaaaaacaaataacttgatttaaaaataggcaaaggactccggaatctgctaatcccagtcggtgccgcatccccagcccgccgccatggccgcctacaaactggtgctgatccggcacggcgagagcgcatggaacctggagaaccgcttcagckgctggtacgacgccgayctgagcccggcgggccacgaggaggcgaagcgcggcgggcaggcgctacgagatgctggctatgagtttgacatctgcttcacctcagtgcagaagagagcgatccggaccctctggacagtgctagatgccattgatcagatgtggctgccagtggtgaggacttggcgcctcaatgagcggcactatgggggtctaaccggtctcaataaagcasaaactgctgcaaagcatggtgaggcccaggtgaagatctggaggcgctcctatgatgtcccaccacctccgatggagcccgaccatcctttctacagcaacatcagtaaggatcgcaggtrtgcagacctcacagaasatcagctaccctcctgtgagagtctgaaggatactattgccagagctctgcccttctggaatgaaraaatagttccccagatcaaggaggggaaacgtgtactgattgcagcccatggcaacagcctccggggcattgtcaagcatctggagggtctctctgaagaggctatcatggagctgaacctgccgactggkattcccattgtctatgaattggacaagaacttgaagcctatcaagcccatgcagtttctgggggatgargagacggtgcgcaaagccatggaagctgtggctgcccagggcaaggccaagaagtgaaggccggcggggargatactgtccccaggagcaccctccctgcccatcttgtccctctgcccctcccacstgcacatgtcacactgaccacatctgtagacatcttgagttgtagctgcagatggggaccagtggctcccattttcattttagccattttgtcgcctgcacccactcccttcatacaatctagtcagaatagcagttctagagcacaggttctcagtctaagctatggaaaagctccccttatccaacagagtttaaaagtagtgacttgggtttttgcgagtgctttgtttactaaggactttggggaggaaccatgctaagccatgaccagtgagragaagcaacagagcctgtctgtccccatgagcggagtctgtcctctgctcttctgcagtcaggtcactgcctactgcctgggggctctagtcattccagtggaagacgaatgtaacctgcgtggtgatgtgacaactgtttcctccctgaccccagaggatctggctctaggttgggatcaatcctgaatttcgttatgtgttaatttacttttattaaaaaagtatagtatatataaataatacaaaacaataacccttctggggtttcttgtggcggttgaaatagtcccacatgtggtcatcagaaaataagccattcctcataccaatataggatcagctccttgacctctgaggggcaggagtgcttcctggtttgtgtattagaatcccttcctgccttgtttcatggcagtgaaatgcctcttggtcctgtccaagtgtatctttcactgatttctgaatcatgttctagttgcttgaccctgccacatgggtccagtgttcatytgagcataactgtactaaatcctttttccatatcagtataataaaggagtgatgtgcaatagcaaaaaaaaaaaaaaaaaaaaaaaawtaggcaaaggaccagaatagacatttctctaaagaaagcacacaaatggccaagaggtatatgaaaagatactaaacatcactaataatcagggatattcaaatccaaaccacaataggatatcacttcacatctgttagaatggctattatcaaaaagtcaaaagataacaagtgttggtgatgatgcagagaaaagggaacccttgtacattgctagtgggaatgtaatttggaacagccattatggaaaacaatatggaggtctctcaaaaaattcaaaatagagctaccatatgatgcagctatcctactttagggtatatatccaaaggaaagaaaatcagtatcaaagctagatctacactctcaggttcattgcagcactatttttttttttttttgagacagtgattcgttatatcgtcacctgggctggaatgcagtggcacaatcttggctcactgcaacctccgcttccggggttcaagcgattctcctgcctcagcctcccaagtagctagaaatacaggtgcacatcaccatgcccggctaatttttgtatatttttagtagagacagggtttcaccatgttggccaggctggtctccaactcctgacctcaggtgatctgcccacctcagcctcccaaagtgctgggattacaggtgtgagccaccgcacccagcccgcagcactattcagaatagccaagatatggaattaacctgtgtccataaatggatgagtggataaagaaatgtggtatatatatgagtatgtgtgtgtatgtagacatatatatgcacaaaataaaatattatttcaccttagaaaagaagaaaatcatgccatttgtgacaatatgggtgagcctggaggacattatgctaagtgaaataagccaggtaaagaaaaatgaatacagcatgttcacttatatgagaaatctacaaagttgaacttacagaaacagagagtagaagggtggttaccagggacagagaggtggggaaatggggaaatgtcggtcaaagggtacaagcttgccgttataagatgagcaagttctggagacctaatgcacagcatggtgactgttattactaataatgtattgtatacttgaaatctactaagagggtagatcttaagagttctcactgcacatacgcaaaaggcaactacgtgagggtgatggatttgttaattagcttgattgtggtaatcatttcacaatgtgtatattaaaacattgtactccttgaaaatatatatatatgtgtgtgtgtgtgtatatatgtgtgtgtgtgtgtatatatatatatatatatgtatatattttttttcagagacaggattgtcacccaggctggagtgtagtagtgcaatcatagctcattgtaaccttgagctcctgggttctatcaatcctcccaccttggtctcccaaagcactgagattacaggcttgagctaccagggttggctgaatatatacattttttatttgttaattatacctcaataaagctgaagaaagcaaacaaaaaactcttatttgagaactaatatttgataaaatgttcttatcaataactttatgtcattttaattattcagacaatatttacaagaacatgcttacttccttaaaaattatgtatgcctggattccattccaagatggctgaataggaacagctctggtctgcagctcccagcgtgattgatgcagaagatgggtgatttctgcatttccaactgaggtacctcgttcatctcattgggactggttggacagtgggtgcagcccacagagggtgagccgaagcagggcagggcattgcctcacctgagaagcccaaagggtcgggggatttccctttcctagccaagggaagctgtgacagactttacctggaaaaacgggacactcccacccaaatactgcacttttccagtggtcttagcaaacagcacaccaggagattacatcctgtgcatggcttggtggggcccatgcccatggagccttgctcactgctagcgcagcagtctgagatcgacctgcgaggcagcagcctggcaggtggaagggcgtccaccattgctgaggtttgagtgggtaaacaaagtgggtggggaagcttgaactgggcagagcccaccacagctccgcaaagccagctgcctctgtagactccacttctgggggcagggcatagctgaacaaaaggcagcagaaacttctgcagacttaaacatccctgtctgacagctctgaagagagcagtggttctcccagcatggtgtttgagctctgagaacagacagactgcttccctcagtgggtccctgacccccatgtagcctaactgggagacacctcccagtaggggccaactgatacatcatacaggtgggtgcccctctgggacgaagcttccagaggaaggatcaggcagcaatatttgctgttctgcaatatttgctgttctgcagcctccgctggtgataccgaggcaaacagggtctggagtggacctccagcaaactccaacagacctacagctaagggacctgactgttagaaggaaaactaacaaacaataaagaatagcatcaacaccaacaaaaaggacatccacaccaaaatctcagttgtaggtcaccaacatcaaagaccaaaggtagataaaatcacaaagatggggagaaaccagagcagaaaagctgaaaattctaaaaaccagagcgcctcttctcctccaaaggatcacagctcctcgccagcaatggaacaaagctggacggagaatgactttgacgagctgacagaagtaggcttcagaaggttggtaataacaaacttctccaagctacaggaggatgtttgaacccattataaggaagctaaaaaccttgaaaaaagattatacaaatggcaaactagaacaaacagtgtacagaggaccttaaatgacctgatggagctgaaaaccatggcacgagaactatgtgatgcatgcacaagcttcaatagccaattcgatcaggtggaagaaagggtatcagcaattggagatcaaattaatgaaataaagtgagaagagaagttaaaagaaaaaagagtaaaaagaaatgaacaaaacctacaagaaatatgggactatgtgaaaagaccaaatctacatttgattggtgtacctgaaagtgacggggagaatagaatcaagttggaaaacactcttcaggatattatccaggagaacttccccaacctagcaaggcaggccaacattcaaattcaggaaatacagagagcaccgcaaagatattcctcgagaggagcaaccccaagatatataattgtcagattcaccaaggttgaaatgaaggaaaaaatgttaagggcagccacaaagaaaggtcaggttacccacaaagggaagcccatcagactaacagcagatctctcagcagaaactctacaagctagaagagagtggggggcaatattcaacattcttaaagaaaagaattttcaaccaagaatttcatatccagccaaactaagtgaaggagaaataaaatcctttacagacaagcagatgctgagagattttgtcaccaccaggcttgccttacaagagctcctgaagggagcactaaacatggaaaggaaaaaccagtatcaaccactgcaaaaacatgccaaattgtaaagaccatcgatgctaggaaaacactgcatcaactaatgggcaaaataaccaactaacatcataatgacaggatcaaattcacacataacaatattaaccttaaatgtaaatggactatatgtcccaattaaaagacacagactggcaaattggataaagagtcaagacccatcagtgtgctgtattcaggagacccatctcatgtgcagagacacatacaggctcaaaataaagggatggaggaagatctaccaagcaaatggaaagcaaaaaaaaagcaggggctgcaatcctagtctcggataaaacagattttaaaccaacaaagatcaaaacagacaaagaaggccattacgtcatggtaaagggatcaattcaacaagaagagctaactttcctaagtatatatgcacccaatacaggagcacccagattcataaagcaagtccttagagacctacaaagagacttagactcccacacaataataatgggagactttaacaccccactgtcaatattagacaaatcaatgagacagaaggttaacaagaatatccaagacttgagctcagctctgcaccaagtggacctcaatagacatctacagaactctccaccacaaatcaacagaatatacatttttctcagcaccacactgcacttattccaaaactgaccacagagttggaagtaaaacactcttcagcaaatgtaaaagaacagaaatcacaacaaactgtctctcagaccacattgcaatcaaattagaactcaggattaagaaactcactcaaaaccgcacaactacatggaaaccgaacaacctgctcctgaaggactactgggtaaatagcgaaatgaaggcagaaataaagatgttctttgaaaccaatgagaacaaagacacaacataccagaatctctgggacacatttaaagcagtgtgtagagggaaatttatagcactaaatgcccacaagagaaaacaggaaagatctaaaatcgacaccctaacatcacaattaaaataactagagaagcaagagcaaacacattcaaaagctaacagaaggcaagaaataactaagatcagagcagaactgaaggagatagagacacaaaaaacccttcaaaaaatcaatgaatccaggagctggttttttgaaaaggtcaacaaaatagactgctagcaagaataataaagaagaaaagggagaagaatcaaacagacgcaataaaaaatgacaaaggagatatcaccaccgatagtaccatcagagaatactatgaacacctctatgcaaataaactagaaaatatagaagaaatggataaattcctggatgcatacaccctcccaagactataccaggaagaagttgaatctctgaatagaccaataacaggctctgaaattgaggcaataattaatagtctaccaaccaaaaaatgtccaggaccagatggattcacagccaaattctaccagaagtacaaaaaggagctggtaccattccttctgaaactattccaatcaatagaggaagagggaatcctccctaactcattttatgaggccagcatcatcctgataccaaagtctggcagagacacagcacaaaaagagaattttagaccaatatcccttatgaacatcagtgcgaaatcctcaataaaatactggcaaactgaatccagcagcacatcaaaaagcttatccaccacgatcaagttggcctcatccctgggatacaaggctggttcaacacatgcaaatcaataaacgtaatccatcacataaacagaaccaacaacaaaaaccacatgattatttcaatagatgcagaaaaggccttccacaaaattcaacagcctttcatgctaaaaactctcaataaactaggtactgatggaacgtgtctcaaaataataagagctatttatgacaaacccacagccaatatcatactgaatgggcaaaaactgaaagcattccctttgaaaactggcacaagacagggatgccctctctcaccactcctattcaacatagtgttggaagttctggccagggcaatcaggcaggagaaagaaataaagggtattcatttaggaaaagaggaagtcaaactgtccctgtttgcagatgacatgattgtgcatttagaaaaccccatcgtctcagcccataatctccttaagctgataagcaacttcagcaaagtctcaggatacaaaatcaatgtgcaaaaatcacaagcattcctatacacca

SEQ ID NO: 94631 - DNA, 318002 bp, Homo sapiens
cagtccgtaacactcccacagctagttagaggcacgttgagatttgagcctaggcctcctgactgcgaacccacctctgagttcaacccccataagatttgggcaggctgggtcacaaatgcatttagaaaaacaaaggtatttagaaaatagaatgacacttacgatgactggtctttgggatccattttagcttactgcctagtagcaaggggccacaaaagggaaaatatcaatctccttagacattggtggcccagctataggttctgcctctctgcccataccttgtgatctgtatcttcagggctcttagctgcaagcaacggagagcatgatttaggcaaaaaaggaatttattgaaagtgttgtgggtaacacagagaaacgctaaaaaggctgggaaatggcttgaaaatcagcaggaaggaagggaggtcagcaatagccaagatcacagcacacggttggtccactgaggccaccacggccacagccattggatttgctgtggccatcccaaaagtgggttctctaccagctctgcttctttgcaccaccagctcctgtcccagcccatgctgtaggtgcctctgagtgctctgacttaggtttgtgtagtcttcacaacatcctgaaaatatgtatcatgattcccattttacagatgaggaacctgaggcttaaatatgccaggtgactggccacaggcaaattcaggcctgtctgactccaaagcccactctccccgtaatcacagtgtggtaactccatcccatggctgggataaaagaattccaaagtatacttcaaagaggttgttccagttgcttctaccagcaacacctgggtggctcctttgcattccaccctttccagcctcaagggaattgtattgtctaacacacatctttgctaatttgataaactaaaatggtgtcttattgttttggtttgcctctttttaattattgaggttggatgctgtattagtctgttttcatactgctgataaagacatacccaagactgggaagaaaaagaggctttattggacttacaattgcacatggctggggaggcctcagaatcatgacaggaggtgcaaggcactccttacatggcagcagcaagagaaaaatgaggaagaagcaaaagcggaaacccctgatgagatgtcatcagatctcgtgggacttattcactaccgcaaaaataatatgggggaaaccgcctccatgattcaaattatctcccacaacatgtgggaattatgggagtacaattcaggatgagatttgggtggggacacagaaccaagccagattagatgcttccttatattttactatctggtatatttcgtgtgtgtgtgtgtgtgtgtgtgtgtgtgtgtgtgtgtgtgtgtgtgaaaaatcttgtcaattgtttttgttcatgtgtctattgggatctttgtggggttaactagttgtctgtatgagatctttatatatcacaaagaagtttttcttccttttattttagattcatggagtacctgtgcaggtttgttacatgagtatattacgtgatgctgaggtttgggcctctaatgatcctgtcgcccaagtagtgaatatagtagccaataggtagtttttcgacccttctgtcccccatccccttccccaccttgtggaacccccagtgtctactgttcccatctttgtgtccttgtgtacccaatgtttagctcccacttctaatgggagatgtgtgagcatatcacaaagacgtttaaccttttatctttcatttttctttttctttttcttttttttttttgagatggagtctcacttcgttgtccagcctggagtgcagcggtgcgatctcggctcaccgcaacctccgcctcccaggttcaagcgattctcctgcctcagcctcccaagtagctggaattacaggtgcccaccaccatgcccagctaattttgtagttttcaccatgttggtcatgctggtctcgaattcttgacctcaggtgatccacccgccttggcctcctgaagtgctgggattgcaggcgtgagccacagtgcctggcctatctttcatttttcaatgaatattttcaccacattttttatgtgctgtttaactttgctccttttcctttgacatacaaaagttttacatttatgaacaaatatttaacaaatatttctcaggctgcccgcataatgcaagggattgttttaggccaaaaactctctgaatacttagataattcctgttcttggattccctgctacctcccagtcctttgggtgagcaggtttatagagagccctttcatctttagagagaggtccagaaacaactctgagagacatgctttttcactgcactttagggcaaaaaaaaaaaaaaaaaaagacaaaggtgagaattgtttgcaccaattatttacagagactcattttatccttatttctaaacaactatttttagggaaagagaaggggaggacagggggctttaaaagtcatgagatttgccctgcggaaagtccctggaagtgagcaagtctgtgagtgagaagggaggacctatctgcctgggggaaaagctctcctttaattgcctgtttcctatcctgcagccccaggcttctcccaagctcctttaaaggttgatcttgacaagaagcctggagatggtgcttgctagacatgggtagaacatacaaatatgaggccaagtgctgtggtggttcacacctataatacaagcactttgggaggccaaggcaggaggatcgtttgagcccaggagttccagaccagcctgggcaacatagtgagacccccatctgtacaaaaaataataaaaaaattagccgtgtgtagtggcgtgtacctgtagtctcggctcctcacgagggtgaggcaggaggagcttgagacttggagtttgaggctacagtgagccgtgtttgcatcactgcattcagcgtgggaaacagagtgagaccctgtataaaaaaaaaaaaaaaagaacgtatgctggatactctcagactctcagaagcatgggccttgctgccttataagcttggttcaaatcccaccccacctctgccaattaacagatgtgtaagtaagagtgagtcccttaagctttgtgaggctcagttttgccatctgtgtgaggggatactcatgctgcccttgtgtgatggatgaggatcagtggtcgtgtatgtaaagtgcatagcagagtctgcccacagtgggtatgcaatcagaggccattctaacataccaggaaattaatcggcaagttcgtgtgggtcatcagtgtgtggtcagcattgcaccaagttctgtgacagcaggttctaacagtcaacctgcgtgagcttgtatggtgtggccaaggagatagggcacagctcacaaaatgactctgcaactgtatatgaagtgccaaattatagaggagtggtttaattcttataagcataaagataactctatggtttgaaataattagagaaagcgtcacggaagaagtaggagcttaagttgggtgttgatgatttaagaaacatattctttgattagacagaattttttccatctgaaaatgaaaatagctacatatttttccttttaaacaataatatgtactcttttaaaaatacttagataatacagtaaatcaattaaaaagtctcactgcccaagaatacctactatcaatactttgttgtatggagaacatatatatttgtatatgaatacaattatgtttgcttatttatgcaaaaaacaggagaatatgtaaatatagtattgtagaatattccattatacagaggctttctaatttgtttaaatccttattactaaaaatttaggttattttagcacggctaagtacatgaatgcctcagtttcatcaatcaataacttagtgattttggtcttggatcactttccagaaatgtcataaaagttgtatcaatttataccaccttccaccatcagtttataagagttccctttttcctacacccttcccagtactgacaattgtcagtgttttacagtcattgccaagctgccaggtaaaaattatattactcatttaatatgtatttttagacaactctgtgttaatcagtggtgataaagacatggtcctagccatcccctctgaaagctcagagaccagcaggaaaaagagacattaaaccagtaattactgtaaactgtgatgaggggtgttgtaatttgcatttcttggattatccagtcagatccttaatgaataaagtaaaacgggcccactgaggtttcacagtgatgtggcctcttgtttcttggtggacagatgttcttttttgcccgttgttaactcatggaatacaacagctagtaggtgaacaacacagaacatcctgaaggattttctaggggaacaacatgaactagattatgcttttctggcctcatttctacaacatcctcagaatcttaggtctattatcgatgccttgaggactataccttgcctgtgaggattatgtcccgatgtagcatactctaattgcacaacacgggataaaataataatacaataaaatggtgctagaacaactggataccagtatgaatttaaaaatgggcaaatgatttgaacagccattttataaagaaattcatgaatgattaacaaacatgcaaagatactcaacaccactagtcattaaggaaatgtaattcaaaccataatgagataccatgtcacactcagtagaatggcaaaaattaaaaagattgacaacactcagtgttggtgaggatgtgagactttcctaccttgctggtggaaatgcaaagggatatagccactttggagaagagtttggcagtgttttataaagtttcctaagtattttcccaagataaaatatttgtccatacaaaaccttgtatgcaattgttcatagcaacattttttggtaacagctaacaactggaaacagtgtaaatgtccatcaatcaaaactaaattatggtaaatccatgctcaacaataaaaaggattaaatattaatacatgcaacaagatgaatgaatttcaaaataactttgctaagtcaaagaagccagacatgatgggctgtgtccagtatggttccttttataagaaattctagaaaaggcaaaactataatgaaagcaagatgatcagtggttgcctgggtccagggtctgggctggggatcaacagcaaaggggtaagagggagctttctgaatgatggaaatgctctgtgtcttggttatggtgatgagggtttgtatacacctatagacaattgccaaaactcagcaggctgtatacttagaatgaatatattttatttatgtaaattatatttaaataaagctgagagaaaaaacattaacaaatctgaactttgctcttttaaaaggtatttccttcttgatttattattgtttttttgagacagagtctcactctgtcacccaggctggagtgcagtggcacgatcttggctcactgcaacctctgcctccagtgttcaagcgattctcctgcctcagcctcccaagtagctgggattacaggtgcctgccaccatgcccagctaatttttgtatttttagtagagatgggggtttcatcatgttggccaggcgggtctcgaactcctgacctcagatgatcctcccaaagtgcagggattacaggcgtgagccaatgtgcccagcttccttctttagtattatttctattctgaattacatatgggagtggtacaccataagctcccagcactcagaggttctcagcatcttaatctggccctggcaccgagcatgacaggccctcttggccacacgaatcacctccaaggcatctgcctggctctgtccttgaagctccctcaggtcagcagttctgtgacttttgtgccatgcttagggcactggaatccctggtggcactgggatcactgtgccaggttttagccatcccaggtactagtacctatggagcatccacctcccaggcaaaagggggcagggcactcacttattccttcacaaatccamccccaacacccccttctctccctgccattatctcttccacagttttaaatttttctcccaggaagccttcatcaaatccctcaggcaaggtggcacaaagcctgcctgaaatggagggggcgtggagaagtggaartaggaggataacacacacaaatgaatatttcaataaattatcatgccatgaatgtcaaagtgtgctcaagaaatgctaatgtccttactgaggagcagcaagaggcaggcagrgggcctggaaagactccatagaaagacctggatgatctggtggatggggccagcagaggcgctggcaggggcaaagtgaaaaaaacacagtgaaggcacctggtggggtgaggaggggtactggggtgggtggagggccaggagctgaaggtttcctagttatgcagatagagtttaggagttgatcaggggccaccagttgagaaatatttgagagggatgagtggctcacggaactgatttctgggctgtgcctggagacggggaggtggccagggctatccagagggcagctggagtcggcttagggtagggcccaagggtcccacagacctggtcctcagtaagggagggagaggagtctttcgggcctaaactaggtggaggagcaaaggcggcatcagaaagtcagacaaggcckggcgcggtggctcacgcctgtaatcccagcactctgggaggctgaggcaggcggatcacttgaggccaggaattggagaccagcctggccaacatggtgacaccaatctctactaaaaatacaaaaattagctgggcatgggggtgcatgcctgtactgaagctactcagaagactgaggcaggagaattgcttgaacccagaaggcggaggttacagtgagctaagatcacgccactgcactccagcctgagtgatagattctacctcaaaaaaaaaaaaaaagaagaagaaagtgagacagaataatgagggatagtcctttcctccttcctctcctctctcctttattttcttctcttccttcttccctctctccttcctccctcttcatcttgtcttcccttccttcctccctctctcctttccttcgtcctttcttcttttctctccctttccctctcccatccttcctccttctctttcccaggcaattcttttcttttcttccccaaccctttctcctctccttccctcccccttcgtctcttcccttcccctctttttctccctttctctttcccttcttcaatccctttctctcttgctgtctttttctccaccttgttcagaaaagcctgcaaagcagagcctgctctcagagtcatgtcacgagtaacccatttgtgttacttgcggtttacctacctgtagaaaatttgtaccctaagatctccacatactgcgggcaaatggtttataattcaacttcacaaatatttactgtgctctggttaactgagtatcctttgtgctagaggtgccagagagatgcaaatggcagcgccagtccttggaggagccagtctggggcccctggctgatgttggcagaagacacatccctctctcccttcaaggatgctgaagagctctctgtctactactaccctgggcccacttttctctccaacaaggtgcagaaaagggcatcgttgccaggtttgcaagatcgtaacaagacagtgcattgtaggtataatctgccggaatgaggaggcgctcagcctgcgcggattggaagggccacataaacatctgtcagtccattgacaacagcacccagaagcccgaattgtgacttcacaccgatttcttcccctgctataaattctacaagatcgtcaacataaataagactttctcctcaaccagtttttcagggccatgccaggctttaaaatgggcaggcccctggccgggcgyggtggctcacgcctgtaatcccagcactttgggaggccgaggtgggcggatcacgaggtcaggagatcgagaccatcctggctaacatggtgaaaccccgtctctactaaaaaatacaaaaaattagccgggcgtggtggcacgtgcctgtagtcccagctagtcgggaggctgaggcaggagaatggtgtgaacccgggagacggagcttgcagtgagccragatcgcgccactgcactccagcctgggygacagagtgagactccgtctcaaaaaaaamaaaacaaaacaaaacaaaacaaaaatgcaggccccagtttcayttgcatgttgttgaatttggagagtcaatcaatcaagccaggtcccacaatgagcacaatgccaatctgcagaatctttcagggcaaaagggaatttagaaagatgagggagaaaggatctgaagactgatccgttcctctttcaatgttcaaagtataaaatttttctcctcagttttatsagttaatactgtcctttacttggctaatatttattatatagcataagatgtaacaaaattttcttaggctaggaatggaaagaaagcaatgattctaactgtagttgggcagtttagagtgtgatgaaggagaaaacagaattttttcatcacccctcaatgtgcatagaacaacagaatcacagaccattaccactgacctttgtcatagattttagaggtgatctaatctaacttcctagtccaagtaggcattacctctctgcctctgacttatttgtacctactatgtaccagtcattgtgctgggcattagaaagagacagagatgaagacaacttggatctccaggaaggagttcagcctagtgggtacagtggcccaaaagaggtttggacctagtgctcacagcgcagaggaggaaagttgcaatttcaggtgagaaaacagcaaagacttcttgggagaggtggtagcttatgtgtcacagccttaatcctcactgtgtttgggcaggttcctgattgtgggaatgcaagaatggatgttgggcatgattcaccatcctcccccaccatgtgggccaactccatgatctctgtgactcacagggaattrgacttctgatctcttccttgaccctgtgacttcccaaactgccttgtgcatgtccaggctttggggcaggtaactgaagtctttggcctatgaggtgagaggtcacttgggtgacctgggagtaaatcccttcccctccctggctctgtaaagccaagtgttaaatgagagacttatattccaggcaaaggctttgtgcaaatgcccatctaagccatgccctctgcaaggaatcccctttcttagtgatgatggtggggagrtggggagggtgcagtgcaactcccattcctgatctcctatcaccagagcagaagaatcactggagaacgactctgtctgaagcttgttcagcctggcttccttgagcaagcaacttattcacaggtaagtccaaattaatacagcgcacaccggctacataaatattgtgctttgattgtcttctgtaatcaaaggcaaggctgctgagtttgttactttccccaccatgcaactgctggaggagaactctgggggaagggaactgaggttgcccaggtggtttttgttgcatgtgtctaactgcaagttgtgtctctgtctatcgaggggaggataaggcccattacattcagattcaataagaatttatcaaatgcctattttgtgagaggcattgaaagacacagtatcttatttcatttttaattgaattagtaatgacttgataaggcacaaaggttagtctaactaacattttttttttccctgacatacragtgatccctacactattggctgtgtccactttattgattgtgaaacagcctaaatgcatggaattggaaactggaagtcattctacacaatacaagaaagcagcaccatctttccatgtacctgccagtgctatggctggcttggcttttccagcagttttctggacttggttgaggtggcttcctaggggcattttctcaccccctcccagctaagactgctgttaattttgaataatttggaggatgctctaccctttgrggtagcagagttttgcaacccacagatcccttttgccttgaggaatggtggtgatggtgggtgtcagagattctgtctgtrtaagtccccgggaaagctcagctgtcgcctgacccgagggtcgtgcagtttccttaaccctgactttaagtcagccctctttaaccccgactcccaagctgggctgtcctttgaaagaaaaacgaaaccgcccagttctgagcgtcggaaaatgggcactcgctccctgggggtttggggcaacttccccgctacgtcgcccagggattttaaataattgccagccaccagaaaccccctaacccttaattcttccctccgagacccagcccgctgcttgccacttccctctccaaacgctggcgggggtgggtggcagcaccgaggcgattttcttcgtctttttttcctccgggttttgtcatggaaacgctgacacaacctccagacggcggccgagcccggccgrggactgagggcttttgggaccctgcgggagcgcggcgcgcacaccgcactccccgggcaacagctggacgcgaccatatcccgggtaggggcggggggagcgcgacgctccgccccggcgctagggtccctccctcctcccggctctccgcaggcgccctcccctcgccgggggccgcgagttgcatttggtaaaacccagccccggaatatatagatcgttggagcgcaatgaagtagcctttggagagaagggagagggcccgtcggacagycacagcggccagcgcagcggcagcggcggcggcaccaccatcaccgctcgcaccccagccgcccggcccgcgaccaggcagcggcggccgccggcgggatcggaggaggcggcggagcggcgaggaggaggagcaggagcgcgcagccagcgggtccacgcatctcagcacttccagaccaactccggcaccttccacacccctgcccgggctgggggctccgagagcggccgcgaagcgactccgatcctccctctgagccttgctcagctctgccccgcgcctcccgggctccggtccgcgcggcggggtccctgctcctgcgccccgggcgcgcttcccggacaccccggtccccgcagccaggacaaagccatgaagccagcgctgctggaagtgatgaggatgaacagaatctgccggatggtgctggccacttgcttgggatcctttatcctggtcatcttctatttccaaagtatgttgcacccaggtagggggcgcgttagcgtggttttgttggatattttcttctctctcgcgctctagctcgctccgcctgatttctgcctcttccaaccctacctctccgccttcggcctcttcggggctcctggctgcccagagctcctggctgcccagatctacscgggtcaccgcgtcgggatggggaggagaagggaaggtgtgcttcgccctcttcttcctaccggctccgggctggaggatgggaccaggaggggcggtagttttttttttttttttyttcttcttctttttttctttgtgtcccttgtctgtctgtctgcgaggtagcagggaaacggagaggtgtgggaagcaaccgggggtgaggggctggtttgaggagaacgaaactccctccctgctgctgccgaggtcggaggatgaaagagttacccggagccggctgctctgcgcccgggcgagccgcctcttcctggttgccgggccgggggcgaagggtgtacgccccggcgaggttgcgagtccctgcagcaggctgggagcccgggactgggctcccacgtgtcccgggctccgcgcagagctgagcaggtgtggagagtggtcgggtgcccagcgttgcccctccaccacgcgccggccgtttgcccccggggtccggstccgcagtgaccttgcggctggtgccccggggcctgctccagcccccagccctgagctggaaactccgagctcctgggtcacgccttgaccactgcagttttggaggaaactttggccaggtcctgggctgaccgtccgtttgcatcccccacttctgggatccgagcaacgggaatcccccgggcggcgtgggaatgaaccccattcctccggtcccttgtggctcaggcaaagttccacgtccgaaatctggactgggggagggacgaggctcgtcgcttcctaggggtgcgagggaaagtttgggttctggagagggaggggcgccctcgagcgcggcggccgggggtgagcagctcggctgcgaagcccaacaggtagaacgttccgagaagccttccgggtaacgcgggtctccccgccaagccgtggctcccctgctcccttttaccctcccttagcagccccctgccgggccacgttggctcagaaatccattttctacgcctccgagttgcctttctcagcgtagtcacagcaataatttgcttttctaattgcaaggaggagggaggtggaaacgcatttccttccagggaagtggggttggtgtttttcatttttgcctcccgccttctcctttcactgtgtatctaacactttaaacagacgcagtcccgaattcatcaagcctgcgtttgggtcgatggcagaggaataaagctgttctttccatcaaacaggcagggctgcaggctgcagattccttgacagcgcagggacagacggcccctttgccccactcggtctggagcagttgttaaggcagccacactgccaaggatatggtccgactctaccacatgtaacctcaggacgtccgagccagccctgttaaagatggcttttgtttgcagctgggtatttttagtttaatgtcagcaaactacagcggtgtttgtctcctcacccaaacctgcggttgtgaaacttataaaggaatttaaaaatggacctggcttgcattccggcaggcaggccttggttgcagtgggcagggccagacagccaggggtatctcagagtgccaagctccagggsccaccggagaccgggccagactcaccccagagcgccaggggactggtggtgtacagatacactcgggttcaaacagtttaaacaaggggccggtgatttggtctagactctagagctgtgttcaggtttcgctgggaccgtgaatgccagtaatgctctgtacgaatgcccagaacacggatgagtgtcagccttcagcaggaatgcgcttgagcttctgtgtacctgttaattgcccagggaaatacaattgtcatggaattctttgtgagaattgggaaataactttctagccaaagatactagaaagaaacttccaacttgtaattgtcactttgtgaaaatttccagcccttgttagtcttaagttgacttgaaagtgacatcatatcttttcagyctagccttttggaagaggcagagaaccttttctaagcttgtgctgaaaaagatcctctgtcgatgatcctgccccatcctttatgtccccctctagtcctattttctcccattgtttattatttrgatctctataaatatacttttctgatatttccctccagtccatagcaaatactactttcaaaacattgtgttgaatgtagaattacagatagttcagttgaaaggccttccttatttcagattacttacagtccacaaaagctctgtgtcaacagtttatcattacacggggcataaaaatatactttcaaatcyacattaaacattttctttttgaggggttcattttattaagctacactgttaatgaccactgatgtggaatctctttcactggtttgaatttctttaaaagttaaagatccttgcttctctgaagtatcttgggggtaaggagagctgatccttcagcctggctctgcagtttctgtctctccagatcaccctgggagaggcagaagggaccacagcatggcacrgattgtgtagctaaaaatttggaggcctctggcaggggttccagatacctacatgtgaaatagaaaaatagtattgcaaaagcaatgggttccaggcttcgttggtggctggagggtatgagaggagggagagaaagaaaaaaaggaaggcagggcgcggtggctcatacctggaatcccagcaccttgggaggctgaggcgggtgaatcacttgagctcaggagttcgagaccagcctggccaacatggcgaaaccacatctctactaaaaatacaaaaattagctgggtgtggtggcacacgcctgtaatcccaggaactccggaggctgaggcatgagaatagcatgaacccaggaggcagaggttgctgtgagctaagatggcaccactgcactccagcctgggtgacagagtgaaactgtgtctcaaaaaaaaaaaaaaaaagagacaaaaaggagacagctggcaaggctggctgtccctctctctgattctaatctggggcccattatcttttctaattcatagaattgattaatttgcaaatttgagtaattggtcatcagttgcacaagggtttagcagaagtgggccttgtcagtaggatagttacatttasaagtttttgatactctgagttaatagtcttccttaagaatattttatagggcaaggaccaggttttagactccattttaatcccgatgttttttgcacggtgtctgacaacagtgggttctcaatagaatgtttgctggatgaatgcatgaagtggttaaactccagaagtagacccacttctctggttttcaggaaggtcacttctagccttgccaagaatgcctggtcaataactctggctctgtctggtggggaaacttcctgccttcctgaactgtgacacggacccagtttaaactaatcaggcgccagacaggagctttcaccgtgrcctaaatttgcagcccgtgaggtgtaggcagctgaggcactgctctgtgtcctggattctggagaaggttggtcttgtttagccacttagatggattctaaggaaatccatccatagaacagacaccttctatggccgtgaactattcctaaagctagggagaatggaaccatatacctgtgatttctacacaggtttgagttcaccaatgaatgcttcctatgaaagttcatcagcttgcattaaaatgtcttgcatacctgccccagatggctgggttttgatggagctgtgtcatgcagtgcaaagctgagaggccccccaggctgcattggcacagagtgtgtaaaggcagctcttcagaaccttccttttgtgttactccataggattgtggtttttgtttgaaatctactgttcatagaaagaagccttcagaggagaaagccttttctctcctgtctgcttcctctctattatttttatttttgcaaaatgtttattttcactgtcacctgggatttctttgcctcggttgaatgtattgaaagattatatcctttatttaaagatgtctcattttacccccttgcactttcacttgatcaggttgaacctaaaatgcattttgtattataattttaaacgaattgtaaacataayatgtgctcattttagaaaatttaggaggtggccaggtgcgatggctcacacctgtaatcccagcactttgggagtccaaggcaggtggatcacctgaggttgggagtttgagaccaacctgaccaacatggtgaatccccgtctctactaaaaatacaaaaaaaattagccgggcgtggtggtgcacgcctgtaatcccagctacttgggaggctgaggcagcagaatcacttgaaccagggaggcggaggttgcagtgagctgagattgtgccattgcattccatcctgggcaacaagagttaaacaccatctcaaaaaaaaaaaaaaagaaaaggaaaagaaaaaaagaaaatttaggaggtatagaagaaaaacaatcattattccaccaccaagaggcaactggtactttaaaaatatattatagaatatatttatatatatttatatattctrtatttttctcaactatgcaaaatgcatatacatagttgagataacatcatgcattttgtatcctgtttgataataagtattttagacaaatacatcattgtcacaactagttattaaagttaaagacaaagtttaaccataactgtttaaatgtatagacttgcatgtgtctccacctcccaccctacccctttgcaggatgtcagtctggtattattttttttgctgtggttgcacaaatttaatgttacgttacagaatctttttgcttatacatggaatagtttggagtcttaccaatttgtaggggctgttcttatgttatacacctgaaacttccattgaaaaggtgtcaagagggtctcaaatatgagactgttatgaattctgaaaacagcattgaatcactgaaggatctcatgtaccccataaatatatacaactactatgtacctataaaaattaacaagtaaaaaaataactgaaggagaagacatttttagcatggggtctctccttgatcatttaaatgtttgcacctcgatggagcattttcattgctgtgctcagatgagacagatgtaggtgatctcctttgattgttacagtcctcattttcattgccttccaaaataaaaaggggtgatcaggcaccacagaaagggtggtttgggggtttccgtggggtgaggggtgagggaatccatccttcagcagaggtatctgctgtcagtatttgtctggttgaaagatcattttgttcatagctttatcagcacagtcatttcaaaacaggaagtcaaaggctcataagcaaaggcaccaccctttcccttcttaaacccaccaaaaggacctctctttagtctggaggtcaagtgaaaaaggctctcatgaaagtcattgccagcaggcctcttctaagttcagactctgaggaaaaccagaagtcattctgctgattcatttttttttctttttagtttttcttttgaatttttgggacaccacctttataacaaataaaaggggaggcagttcttcctatraacaatctgatctgtcagttaaaatttcctagaacttgtaatttgatgcatcttagatccaatgtgagtgattgaaacttacaagcagacttgttctcctcctccccagccccctgtctgtctgtctctctctcttttcctttcttctactctgtgccagatactgttcttggcactggagatgtaacacatacatacatctctgccttcatggaacttagattctagtggggcggacagactttaagcaaatgcagaagtgacatatatggtatatcagatggtgttaagagaaaaacaaaacagagaagatggttgaggggtgtgagaggcaggggttgcaatataatatagaggtaattagggaatgtcattgataagatgacactgagagcagacacctgcaggaaatgaaggagccggccatgttccaggcagagagcaacacaagtcaaatctggtccctgaggcaagaacatgcatggcaaggtggtcagagtgcccagagcagagggacggaggcagccaacaaccacagtggggagagacaagtcggagagagacaattgttttgagccttgggtttaactgtagatgggagggaagcgctgcagaagcttgagcagaggtctcttggggcagggaggcaaggaataagggtggaagcaatgtagcaagattgaaaatgaagtctcctacttgcacttttttttttttttttttgaggtggagtcttgctctgtcacctaggctggagtgcagtggtgcaatctgggctcactgcaacctctgcctcctgggcccaagcaattctcctgcctcagcctcctgagtagctgggattacaggcatgcaccaccacacctggctaatttttgcatttttaatagatactgggttttgccatgttggccaagctggtcttgaactcctgaccttaagtgatccaccctcctcggcctcccaaagtgctggtagaggtgtgagtcactgtgcccagctctacttgcacatttgtgctcatctttgggcagccggtagtgtactttggttaagtggtcaccatataagtcccatctcccctctaccacctgctcccccttgacccccaactagaccatctcctttttcaattttttaaaatttatctttatttttaaaaacagggccttgctstattgcccaggctggagtgtagtggtgagatcacggctcactgcatcctcgaactcctgggctcaagggatcctcctacatcatcagcctcccaagcagctgggacttacaggtgtgccacacacccagtcccatttccaatttttaaagcagtaatgaagagatctgaaaaagagatttgagaaaaattttgactgagcttgtagtgggaaattcgtaatatcttcagggtgcaatcggtggcatttgttaataaaaatatccagaaaaagtgccagacttaaatcagcactcaataaaaataaaacgatgaaatggatcagcgctctgggagtggaagacccgagtcctagtctggggtctcccatgtcctatccccataaattattgtgtattattgattccagaacatatttttttcacattttagtgattatgcaatttgtgttgtgattgatggcatctcagcaccgtgctgccctttaacgagcaactgtttcgtttcttagtgttccatcaaatagcagtgtgccttcaccatggatgccttctgaggccacctctgtaaattgtgaaagtactttatgtaaactgtggcacacttcataacctcagtaagtgatgaaaaatggcattcctccaagatgcagagtctgagggctcaaaagtacctggttagtcttgagtacttgcttctcaatggccagactggcatgcagtctgtccaagtctttttaactttgcctggcacttattttcagagcccagggcttgtagttagtatttgtctgattaacgatgaggttggttaagagttagaatggggagggtgggaagtaagtgatttaacttgaggcttgaacctggaagttcatctagaaatagacataaacattgcccagggaaagtatcaccaatgtggatttttgtttctttcaaggctactgagctgtcatgactttgtcatttctcttttctggcccttttagaaatgtactgtggttgtttgtttttttgtacatcttcctcttttgacatagcaaggcatggattctgtcaggttcatctttatagcctctgaccctggcccagaggtgcctaggaaacatttaaagagtaaataattgattctcaaagataagcctttccacctcggtcaccacccaatccatgtgygcagaactcagaaggaggagccaggttggattgtcatgtacaaacagcatctgctgtggtctagtccctttgtctcccaaatctctttgcttctgttctgctgtgtttcagggcaggaaatagaaatcagtctagatattttattttttaatttaatttaatttttttttttgagacagagtctcactctgtcgcccaggctggaatgtagtggcaccgtctggctcctctgcctcctgggttcaagcgattctcctgcctcagccttctaagtagctgggattacaggtgcccgccatcacgcccagccaatttttgtatttttagtagagacagggtttcaccatgttggccaggctggtctcgaactcctgacctcaggtgatctgcccgccacggcctcccaaaatgctaggattacaggcataagccaccgtgtccagcaccagtctaggtattttaagcagaaagatatttactagagggaattttgtgcttatagaggcataagggggctggaggaatggggctccaggaatgtctcccagctaatggtagtagtttatataataattaataaacaaacgtatgttggcatggctgttcaaaaaaaacaaaaaacaaaaaacaaaactgactcactaggggtgctacaccctctgatactgtgtctggaactattgagttcaagaacaaattgatggcaaagccggagagtggaccctataatgctgttgcaaaaaaccctcgtgaccccatctccatgcttgccagcggccaaacagccccaaaggcaagaagatggcctctctgccccacatctgctttctaaatctcaagtgagtgcttctatttgggagagccaaattcacatctagaaccttagcttcaaagaagcctgggaaatacagcttttcaattaccagcctctgcaggctagaaagctttctagaaggagggtagaatgaacgatgagcaaataatcacaatactcaccacaccctattggtaaaacatatttgagcagccatccctcaatatattttgtttataaataatttctgcatattactaccattatctacatatctaggataggatcctttctgactagtgactgcaaacccctatgtcgttatctgttggataattccgttggctgactctttatcaattctgattctttcatccttttgaccttgtaatgttgtccacaaagatacaatggagagctagtactcaagagggaggaatgccattttcttgtgtgcctggattgtgacaattatcttcaagttgtggtttcttggctgggatctctttaggcctcagttctattttgtgaggaataggatagttaaaagtagataatataatctgtaaatttacttatgattcagttgtaaatggttattcattgaaatatgctgagaatggtggaattattgaggtggtcactccagttcattttgtggttgaggatacctgcctgagtttcataactgacatgtaatttgatatgacaggttagatggagttgtttgtggccatttgtattcttgatatagttaaaatttttttaggttaactgaaaatggaaggtctggtgtctagatgaacaaaaaatgggaagtctgatgtttccttcccggaccccttttgtggcacagtgtccactaggattttggaactccaggactagacctgccttgaatgtcattggttattgtcaaacctgccattgtcaactctgggtaaaagtacagtgttaacctggtgccagttctagcggtggtggaggcttagtttggctttagataagctgtatggggagggctgatatttccagcatcaccaggacttgggttctgtctcatgtagatatggatagagacaaagaaacctggtaatggaagtgtttcagtccttatcattctctggcttgaatcgttatcttaaatgccttgggagaagaaactcacaaaggcaactcaagtgaaakaagctggtggctgggtttctgttagaaactgttaacttcgaagaatctcagaagagggaaaccacagaggcccctctaaggtagtgttgtaacaggacacttaacatttcttaacggttgtcatattttacctttaatatcattgcataaggtcactcattatagtgaaaagagcacagaatttggagtctggacaccagcttttaggatttggctgttccctatatccatttgacatcattcaagatatttttgttaaatgcttactaagagttaagctctgttctaggtgtagaatcaaacaggtgaaaatccatgtcctcatggaacatacatcatagtgggggagacacaataacaaatggatattaaattatagagtatgttggaaggtgacaaatgctacgggaggcggggaagcaaggaagggggatgtgaagtggcagtggtggggggattgaaattttaaataggattgtcagggaagttctctctgcaaaggtcgctttaaagattgaaggagatgagggtagatgggagaygaaccaatgaaatagtaaagatatttattggatattatttaccgaaggccaacttgggtcaggcattgaatatagattactcccccatgggactcgtataatgtatacgctataattaccaccattttacaaggggggaaactgaagcatagagcattatcacttgtctaaggtccccaggagaggaatggatggaataaaaaccaaacccggctgtatgacttcatatccgctgctctgaacatctgggagggctctcatttgggcattactcttcccatccaccctaaagattggcgagaatgattgcagtttagtgatagacattctgcgaagggtgggacctttctgcccatcaaagaatcattctgcccaaatgccaccaatgcccctccttgagaaacagctcaaaactctatgtgtaaacagcatctggcgtagtacttggctgcatcccatgacttgggcaagtgcctggcaagtgtaggggcttaataattgattgaatgagtgactgagtgaaagtcgcagacaagagatttggtcccctcatttgccaagtgaaggtagtaatattacctcttttatgggtggcggtggtaaagattaaatgagaagttagatgtgaaaatgcattgggaatggatgtaaacctatgtaacaaaactgcatgtcctgcacatgtatcctggaacttaaaattaaataaaattaaattttaagaaaagaaaaaatgaatgtaaaagcagtataaacatgttgttgttatgataaattacctgtgtggttcctcgttcaaggatgtgaatctccatgtcaacaagatgctgttctatttaattctgtttgaaacctgagcaagtttttatccttttaacatgtgcgtcctacactgtaagatttactgaaaggatctgacttctataagtgtgaggctcctgtgaatatcttctctctgtatgtgctcaccctctgtctgccgtactaacaggcatacccgctgccaaggccaaaactgtgtagcaatttgcaaagcagagtttatatttggtcagaaatcagccttgtgtttttttgctgaatgcagtgaccgcagcatttcctcccaattatgcacttaattactcctcaggttcccattagctttaactagtgacacttgggaaataacaggcactggtcaatgccatttctgaagctgaactccgaggaggatgaaaagcagtcrtttcagaaaaataacagtggtagcatggcagcctgtatgtgagcagttgttgggtgggttagcatggctcattgcacaggacagcatcaattggccctatgtctccacattgggcttgttctgtgctgaggaggactttaagggctcttcctrtataggggtcagtccttcccactgcttaactgcaggtgtcatggagcttgctctgtggctggcatttgtagctggggcacagacccatttcctcccttcttcaccagaccaggtgctgaaatttagttcaaagactccataaccctgatctgggctaggcccggcattcttcaacctgaggccaggctcacatttgaaatagtccctgttaggctgcagagttatcatagaggaaggggagcatatttgtcagggctcacatttctttacaagttgaaaaagtttctatctttttaagcacccagacctctttccattccacctaatcattgatttagactatttgtttgcaactggtttgggacctccttcttcccccataggggacaggtggcaatgtctggagacattttgggttgtcattaactggggaaggtgtgctactggcatttagtgagtggaggccagggatgctgttaaacatcctacaatggataggatagacttccccacaacaaagaataggccagctcaaaatatcaatagtcgggaaaccctgtattagtctgttcttatgctgctgtgaagaaatacctcagactgggtaatttataaaggaaagaggtttaattgactcacagttctgcatggctggggaggcctcaggaaacttaaaatcatggcagaaggcacctcttcacagggcagcaggagagagaatgtgtgcaagcaggggaaataccagacactgataaagccatcagatctcatgagactcactcactatcatgagaacagcatgggggaaaccacccccatgatccaactaactccacttggtcctgcccttgacacatggggattattgcaattcaaggtgagatttggatggggacacagtcaaaccatatcaaacccttatttgattcaacatttttctgatgctttatgaaaaaaaccagtaacaacaatgaccacttaccaaatacttgctctgtatcaaacagtatgtcagctgctgtatttggattatccatcctatttaatccccaccacaaccttgtgagatgcacatttaccaatcccattatacaggtgaggaaactgaggcttagagaggtgaaggagcctgcctaatcggaaagctggaacaggatcctggctcaggtctaactgacagcaaacactgtactcttcacctcactagtatgcccatctccatgttcttggtttcagataattaggtcaagaagtaattatttcataaaggccttaagctcagctgtaaactctgtaagtgggacattcaatgatagccccttctcttcttaccctacacgctatccctggtgagctcatcctctcttggggcctgsggtatcatctgtgtttagatgacgctcatgtctttcttcaacttggatgtgaccttgggtcgaagtctagttcatgtattacctcttgtrttaccatccatcccctcttggtcagaatgaggggatagatgtccttcctstcatccctgtggtactttgtgtgtgtacatctctaatattactcattctgatacattgactccttcagggaaggggccatgtcttgtttagcacaatatcccaacatctccaatagagcctggtacataatggtcactcagtaactatttgctaaaagaaggaatacactgatggtaattggtcactaagaagaaaatccccctttttgggatagcgggtatggaattttcaatgctgatttgatttwcattttgattctatggtgagctgtcacttaagagagccaagaacaaccccttttataccatggctaaatgtgaacagccaaaaagtgaacaactgtcaaagttgtaggaattgcatcactgtaaccacaaaggtaattaaatgtgtcccagaaagggatctgctaatttggtttgcaacgggagggtctgagacaagacttctgtagagcaacactgtccagtggaaatacactgctgctgcacacagaactaaatcttccggtagccatttttacattgaaaaaagtgaaaagaaacaggtgagattaatacctgaaatattgcaacaggtactcaatattaaaactcactgcaatattttacatatttttggtactaagtctccagaaatccaatgtgtatttttacaggacatctaaattcaggctagctgcatttcaaatgcttactagccatacgtgactagggctactgtaatgtatagtgtagctctaaagtgttagagaaccttttctacattgaactagggctttttttggtctcccctcaccctaatttaaaaaaaaaatttatggtgacagaatcttgctctgtcacccaggctggaatgcagtggcatgatcatagttcactgcaactttgacctcctgggctcaaggaattctcctcagcctcccaagtagctgggactacaggtgtgcaccatcacacttagctaatttttgattttttttttcttttttttttttttgtagagacagggtctagttatgttgcccaggctggtctcaaatgcctgggctcaagggatcttgcctcagcctcctgaagtactgggagtacaggcgtgagccattgcgcccgccccttccattttcttaaggggatgttgtctttcctgggttttagctataccctttgggaataatattgattatcttaaggctcaacatgttaaatacaagatattggctgcaaagttttatacacacacacacacacacacacccctctaaagtcatttcaggcctctaaggtatcttcagagtcttctagttaatcagtcgctatctgaagcttgattgtgctattgagatcttgacacagtctgccatgtagcaagagcaactgttactagctccattctacagatgaggcaatggagactcagaaggatttagggaattgcttaaattttgtttcaaatggttctaataccaacgtttagctgcaaagtctggcccaaggaacattcattctattagggtggatgtaaacacacatacttcactgtcttatggggccagatgcgattgctgttacaaagagagacaaactgtgaaggaaagggagaggagggtgattgattttggtggtggtggtgatggtggtggttgtggtggtggtggtggaaggaaaccttccagggaaagttgaggttggcaccgggctctgaaggatgagtagaaatttgctggcggaatctgggaagggagaggaaagacattccaggtgaggacgcctgccagagcagggagtggggcagtgaggagagtgatgtctgggaatacgggagcccaggggtggagaggtgaacctggatggctctgaatgctctaaagtttgagttttattcttggtaccagggagccacagaaggtttagtgtctcctgtttttcagatgatgaaatttaagctgaatttaaactstcttgtttcattagaaaggcagtagtttcaaactcactttctcaaaatgaactcrgggccatttggaaatcgtttctattatcatcatttaatgggaggtaagattattcatgaacgactaaagwgcaaagtaagaaagagcttaaaggcactctgtagtgggatttgaaactcctctgttttgcattgctcgggccaaaattataggccatggaggttaaatttcagtctctcagttgctaatggtgccctagcttcaccctcagagggctctggaagcagtggcaggagaaagggaaagtgtgtaaatagtcgcagggaagagagtttcttgcttcagtgggagctcatgggtgtatccgggtcaggctgcagctgttgggctgccctagagatgagcagtgaaggatggagaacaaagtctgctgcttcctcctggaagcgagacccaagttcactgtgtgtggggtctgagtgcattgtacccctgaaagatgccgccctgtgtcctctttaaatcaaaagactgcctctttttttaggctccccttcctgggctgtgggagagggcatggggctattgtagagctcatacacaatgtaaaaaggcatctctctgtggctttcacagtcacttctgggggccattgtgcttggtacaaagctgagggctgcctgtattttctctgctagactgtagcacttgacgcctgtcgatgaataattgagagctggttttctcataggggcatctcaccacctttgatcccctttattttccgttaaaacatcaccatcatcaccaccaccaccaccaccaccaccgcgaccactacaaccacgacagggagaactcttccaaagkcttaattgaaaaagaaactaatataatgtaatcacagatatgcagcgtgttttaaagggggcatgtggacaggcaagctaaaagggtttctggatttacacttgcaaacttataaagatttagggattagagattggaaggtctaattgaggtagtacttattattggaagcctatgcaaaggtattggaatggggattattttgcaattggaagaattagtgaaatcctttaagagcgaaggtttcattatatatagggttttctgtataattttgctattcaaaaatggaagtgcaggtttgagatcagaaactgaacaggcaatcttttagttaattgtaataaaacagctttcattgggagagtgtgagccatcatccgaacgacaattatgtgcttaaaaatattaactcggaatagtggccttgctcactttaggataatccattgcattcaggaggggagcagctcagggctctttcttgggactctgcagagaattctttcaaggcttatgctgactttgtttcctgtgcctgtaaaagcaaaatgagatttttaaaaataaatccagggctgatagtaagtgccttcctgcaaatgagatttgagggatgtgcaggatgttgtcattggaaagtcacagcaacattccttttttattttcatgggaaataaacaaggaatggattaggaacacagaggtcattgctgagtgttcgatctgttataaaactccaacaaagtagaaagggcattgggtgggcattgggtggggcatcagggatcttgggttcttgtcccagttcttctgccccctttggggaccccacatgtgttactaacaatgtagatgttggcagttttcaaactactcctctaagccgaagcatgggggaaggtccttggacggcggtagggggtcccagtaaaccccacccccatcagagtggctccttgcttatctgtttcatatttttgggttctgagtaaaattttgttagaattaagtatttcagggctaaaaccaacaattttgcagttgactacttagactatttagactatttctaaggtctcttcccaactcagatctgatgctattagcagttctcaaaatcaatacacatttacatgagggttaaatcataattaaaatgaataattactgttcatgcagtatgaactgtctgacatctctccacccctccatccagcactcaaacatttattgaccaaatatttatctgagcaaagagacaaatctaaataagacttagttcctgcctacaaataacttgcaatttagcaagtggtgacagacccataattgttagctgtaatgctttataataatggctgtgggtggctaggaaaaaaaaaagagtaattagtttaggggaggtcagggaacttgacagaggaaggaacatttgagctgggctctggtcatttgttcagttatttaacaagcatttgttgaatggctactgtttgtgccaggactgttcctgtgctagggaaacagcaggggacaaaacagacaatgatccctatcttaatagagctcacgttcttggcataaaatttatcaaggggcaaggttggtggccccactggctccttcaccatcatctccctcccctgccctatgatgcctcagagtaaagcagcattatatatatatatatatatatatatatatatatttctgattatgaaattaattcaagtgtattatagagaattttgaaaaaaggaacttacttccaaaaaaagttaccccaatccctgccatatatatgcatatatatatgtatttatatgtatatatccatggaaaaatagaccagaaggtcaagagatttttcctgggtggcagggattagggatgaatttttttgaaagtaggtcccatatatatatatatgacttttttttagaagcgggtcccttatattatatatatttacaaagatatattttaaaaagttatccctcatatattattataaatgtatacatttataaataaatatattataatatatacatatatgtaatacttgtaatatataattacatatatgtagttatatatgtataaattataattatatataaatataaataataatatataatataatatattatatattataataaatatataaataaatagaattataattataaaaattataataaacacatgcaaaaacaatattacatatatgttatatgtaatagcatatgttacacatatatgtaatatatgtaatatgtacacatgtagtatatacacatatgtgaataatatatacatatgttatacacacatataatatatacacatatatgtaagatatgtaatatatgtgtgtatatatatttacaaagatgaaatcgtcaggcttacagtgtattttgctttttccatgtagcaccgaatcatgggcattttctcatgtcattcagttttctctgacaacactgtaatattccatcagatggatgtattttcattttgccattctcctttgttgaatatttttgagaaagattttcccttttaaaaaaatgccgttttttttgtaaactaaacttttgtctgagtttcttaatgtccctttcagataaaatttcagaggggcaattcagaggttataaacctttgaaggctcttgataagtgtaaccaaattattttctagaagattgtatctattgatgctccaaccagcagtgtgtgaatatgtccatcttactatatcccagctcctttgattaagctgtcatccagattcctgatggagccttcctctatctcaacattcatgcttgcattgagtttttggtccatactagattataggcttctggaggccacaaactgtgtccccagtccctggcgtatgacagacttgtaataaaataaatgtttgttgcatacatgcttgcatgtctgaatgaatgagccaaggaaggtaaggagaggtttcacttgatctgggaagagaacagaactttcttcagatgtcacaaagtatcttattaatgggcttccagggatagggggattcatgaatggacaagtagcttgctgtaaagccacctccataccctcagtgcctgtccaagagtcctataatagatcatccttaggattcaaattcaatgaaaagatacattttcactgctactcactaggtacccattacaggtgttaaatcatttagtcttctccacagcctggcgaggagaactggcctcatcctcatttttaggtgggactcagagaagttttgtaattaacttaaagtaacccagctagtagttggtggagctcggatgccctggctcatctgactcaaagtgctctaataagaacttctctctgcaaagcgtgggctggcatctgcgagaaaaatttctttttgtgatttaggaggaaaaacatatggagaaaccctattgtctgaatgctgcgtctctccctaattcatgtgttgaaacctaatccccaatatgaggctcttagaaggtggtggtctttgggacgtgattaggtcatgagggagccctcatgaatgggattagtgcccttataaaagagaccccagagagaccctcacctcttgtgccatgggaggacacagtgagaaccaggaagtgggacctttccagacaccaaatctgccagtgcctcgatcttggactttccagcctccagaactgtttgagcaataaatttctgtagtttacaagccacctagtgcaggatattttgatatagcagtccaaatggactaagacaaggaacgatccttgagctgaaaggaaaatgaacaattgctctgcagttggaaagacacaatgatagctctaggaggcattgtgcactcaattgtcctcaactgattggagaaaggaattcagttatgaggaagttcatttagtgagaaggtctaagagctcttcacatgtctcctatgactctaagaagggtgatggctggcagcaccctgagaatgaagcctctccagggagctgtgtgttgatggggctctcaagtttgggaagcaacccccctaacaggaagtgggggtgggagacagggagagaaaaamcaaagcaaacccataactcaaactgtatctttcttcttgcaaaagtgaaagacattgctgatcgttacacacacacacacaaacacacacggcagatggagcttcctgtgtagtatttctgttacttatatctccagaaggaaggcctggrtatattttaattttattattttcttttcttaaacattaaaaaaatgatttccactagcccataccagagaccccaaaatacactgtaagtaaaaatgtgatgtttgccacgtgaatgcagtgccagcacctctcttccaccaggtccacgtccctaagcctttttatatctgaattctggagtctccactgaccccttccccatagtctcttttatgtacaccctgacttcccagcagcagagtgccgagatggaagcggatgaggggaagtgagaataagtctaaaatagctgtctattaggtttcctgttaagtaggatgtggtcagttagcttcggttatctgtaagtctagttcaggctgttcctgttaacagctgagtattcacggggccccagagcatggaggtgcttgcctgggaaggaaagcaattatcagaaatgttggggcccagtcactaccttgaggaaaaccggtgggatttagccttttgggaaataaaggtggtgttccctgtggccatcagcagcagtggcaggcaatttcaagagcttcaggaggtgactggaaccatctagtctctggtcatttgggggatgagatgacatggtttggttcttaacacatagtgggagaggcagtgaactggtgccttcattctagggggttattgaaaaggaggtttttaaaactggaaatgacaacatggaaggagcctttaaacagtgcatgtccaaggcatgtccaaggaaaagccgttttcaaaagagtcacctgtctttacytggcatttccaaacttgcctcagatatctttctgagggactcttaacgtattggtagaaattggatgcaactccttcctttcccaacccaactcaaattggtttaagcaaaaaaaaagggcccccccttttttttggctcagggaactgagccaaactcagtgtggcagagaccaagcaccctagcatgtgattgttcatgctgtgtctgtctcctcatggtggcaagatggctgcctgcggttccagcctccatcctagcctttcagcagtcccagtagaaagagagagtacttcttttttccagcagtttccacaaaagttctggaatgtaaagttcttaagggcagggatttttatattttgtttactgtcatccccagctcctagaacggtgcctgtcctacagcaagtgttcagtaaaaatctgttgagtgagcaaatctcattggtgtggccgggatcacatgcccagtttgagagtaaggttgggagtgagagaaagaaaactggagatgctcttatccaagacaggcatcagatcttgtttttctgatgaataacaaccaagagaggcaagaggtaaaaaatatataattagattttaaaaagtcttgcactcttaggtagtaggtagtatgctaggaagttttttgccactaggaaaacctatttggactgaaaatggccgcatgaacttttgattctgtttacctcctgttgctagaagacaaatgtgttcctatggcttgaagaagccacaggacatatttttctcatgtatgcatgccacttgttgaagatggctcaccaccatgtctgccttcctgccagtgggaagagggagagaggtccagcggagggcattccccttggatccatcacttttgcttaaatctcacttagctccagccatttatgtctgtgggggaggctgggaaaggtagtcttyrttccgtgtggtcatgtgctaaacttgtgttttctttattctaaaggaagacagagaatggatattgggggtcaaccaggagttctgctgcaaaaggttctatactttagttggtcagtgctctgagcccctgttgaattcaggcctatctttcataaacatctgcttagtcagtgcactgagttgatagtgtccccgcccccccctccaaattcatgttcttcctggaacctcagaatgtgacttgacttggaaataggggcattgcaaatatagttagttaagatgaagtcaaccaggtgcagtggctcccacctgtaatcccagcactttgggaggctgaggtgggtggatcacgaggtcaggagtttgagaccagcctggccaagatggtgaaaccccgtctctactaaaaaatacaaaaaattagctgggcatggtggcgggtgcctgtaatcccagctactcaggaggctgaggcaggagaattgcttaaacctgggaggcggaggttgcagtgagctgagatcgtgccactgcaccccagcctgggctacagagcaagattccatctcaaaaaaaaaaaaaaaaaaaagatgaagtcatattagaggacagtgtgcccttaatccaatatgactagcgtccttattataagaggagaagagacacagaaacacacataagaccgtgtgataatggaggcagagactggattgatgctgccatgagccaaggaatgccaggagccaccagaagctggaagaaacaagaaaggatccttctctagaggcctcagagagggcatggatgggcctgccaacatcttgattttggacttgtggtctccagaaccatgaaggaatacatttctattgtattaagccaccaagtttgtggcactttgttatagcagtcctgggaaaatactgcagtctgaaggaacacatttcttgccttgacccagtagggattctttccagttggagtcaggggatgtggcttcttagcttcacccctgtgccgggatgtgactcagcagaggtcacttaacctctctgtgccgtactttccagctatgaaatgggaagagagctgcctttctgctctgctgtaacactgcaaaggtacagcctttcatgacttctcattgcacccagaagagaaacccaaatccttagcctgacttcaaggtcccgcctcactgaggcctgcctggtcccacttccttgttcccctgcccagctggacttgcgccactctgccttctttcagtgccttatgagcaccacactcttgccacgtcacgaattttgcacttgccgttccctgtgcttggcgtgcttttccttcaggtcccgtttaatgttgcttcctcgtattggccttcccagttgggtgcgctggaataagttatcacttaaaaaaagtaatctactgtcatactttacaatttttagaatttggcccagctttttaagccactgaaagaaatggtttcaaaaaccaaacctgggtgcagtcacctgagcccactgttccagctggtggcttccttctgtagggagcggtcatggattctctcacgcgtcgatggggggcaacgatatcagatatggcaaagattggctaagaaagggaaggcatttttggagagkgctttggggtttctgatacctaaatgtctcatccaagtgaayagagtatttactcgtctatgacttgaaaaaagaatatctttttgatgttattgtaaataggactgtttccttccttctytccttccttccttccttccttcctctctccctccctccgtccctcttttccttcctttctcttgcattttttttttttggagttttgttcttgttgcccaggctggagtgcaatggtatgatcttggctcactgcagcctccacctcccatgttcaagcaattctcctgcctcagcctcccgagtagctgggattacaggaacccgccacaatgcctggctaattttattgtatatatatatattttttagtagagacagggtttcaccatgttggccaggctggtttcaaactcctgacctcaagcgatccacccacctcagcctccccaggattgttttcttgattttatttttggatagattgttgctgatataaagaatgtatggctctttttttttttcctattcctcactaccttctgccttcctttcgccttcccccatcccttctctttgctgaagacggtgtgtcatctggggtaaccctgggtatttacgagccagtggaggctgctctgccacctggggctgctgggccccagagccacatcaaacagggagcccccccccgcaaaaatgaaaggaggccatgtcaaatgggcagctggtgtttacttcttttaagtttaggcacatcctttacatccacatggctttattttttaggcaagtgggctcaccactttcctagaccatgtggccactgcctcccttccctttccccaccctcagtgtcattttggcttttcccacagaggaaaggctcacagaactccaacgtggttctgcttgcttagatcgatgagacaagattttggtcctttgagcaaggtaggagttgttgtaataagagctgacaattatggaggacctagtgtgtgcccggagcttcacacacattgcctcaaattctcacaacggcctcataaggtacatgttacctggacaaagacagcagctcagagaactcattccacttacccaaggttgcagatttcaactcggkcccaactcactccagagtctgtgcatccccccacttaagactttaatgtcttaaaaatgtccccacttcttctgtcttttagtggcttcacgtctgaagtctctgcttactttttggaacagatggtggttctcatagacttggcccggagtcagcatgggagaaagtcatcctgtctgaaacagtgctgattcgggtcaccacagattcaaggtttctaaccttggctctacttaagaacaacttggacatcctttcatgtagttcattgatacccacatgcctcctggtgcaatatctccaaaactggactcctgcatcttcacatgctcacccttcacaccccatccattctccacacccttcacatcccagttcctgaaggcaggtcccttggttacagtctctccccatgcatttggttgttttttgttgagatggagtcttgctctgtcgcccagactggagtgcagtgacgtgatctcagctcactgcaacctctgcttcctgggttcaagagattcttctgcctcagcctctcgagtagctgggattacaggtgccagccaccatgcccggctaatttttgtatttttagtagagacaggattttgccatgttggccaagctggtcttgaactcctgacctcaggtgatcggcctgcctcggcctctcaaagtgctgggattacaggcgtgagccaccgtgcccggcctccccatgcactttgactttttttcattgcactccatttgtccatgcagcaatccctcaggatgtgattcattcagcctgccaattttggataataagagaagagagttcagatacaaactccccaatgttacctgcatctctttggttcctgcttttggagagtaaggggtacctgagtttgttttatgtctcttcttcagtattctgctccacaagctccacgtgtacttattcctcagtacgcccccttagtgagtttgtttattgggtgagtgaaaggaacagatgagtagatgaatgacccaggtgaggcctggggtcggggaggactgtggctcttcttacctgctgttgaagctggcctggtggaggaggctggaggcaaaggtggggacgtagtctctgtagcttctgcaagtagagggtctgctgctggggtcagggaggatctgaacctgggcctgcttgactctacagtctgtttgtttctactactgtctgcgaaggtctgctgtttctactgctacatagtcacctgcatctaggtcttctttttgccattgttgggaattggcataagatggaatgagattagatggcatcatggtcagagtgacccatttcctaatggttcctctcctggttagtggctggagtgggcaacagagacaagtcatctttcagtgggtcattgccaaggagggaaagactgggcttggagagctgtgtgctggttcctgggaacaggcatccttggcttgagatcacaaatgggacagccccatcatgacgattcacgatcacattaacatactcagtgctctgggaagtcctgccattaagaaccccagttaacccagaatttcttaaacttacacaaccacagaatcttttttggggactggagaggtaccacttcatttattcattaaatagttactgagcacctaccctgtgcagatgctattcacacctgagatatggaggtgacaaggcagacctggcaaacttacaatgttctcatctataaaatgggtatacaggagtgtctaccttgcagggttatggtgaggtctacatttaatgaactaatgcagggtaagtgtttggcacagcccagggacattgtaagtggtcagtgatacatatgtatgattgttatcaccctagtggaggatcagatattaaacaattaaacaggtacctatttagtaacaatggcgttaagttatacaaaagagaaggacagggtgtcaagagagcacatagcaaggaaacctaatgaatgttggcaggtgggatggcggtagtggtcacagaaggctctctcctgagcaagccatgctgaagctaagacatgaaggatgtggggattgttggaaaagagtgggaagggagtgaggcctccttgccttgggaatcatggcccgaatgtcaggggcttacacacacgggtgccgtctggggagttaaattctctggactgtctatttcagaattagggaggtaggggcaggctctagtaggctgtggggtccagaaatgaatgtctttaaaacttaccccagaaatttggagcacccttgggaatattttttggaattgctgctccaggacagcgggcctcagaggttcatgtgcttagaaatcacctgagtctcactcaaaatgcagccgtggggcctgggaatctatttaacagacacatcctgaggcgattctgctgcaggaggttccccgaccttgctttgagaaacacatctctggaagattgactcttataaaaaatcgggaacacgaaggcacgacagcaaatgattccagcagagaatatacaggggcacctctagagactttgtatttgatcttagaaagtacacagtgggcaagaagagtggtatgcaaccccatgtcaggagggccacagctgcagggagcggggctcggaggagctgcagatcctaagaaggatccacgacctttgggarcctcgctgtttctggccttctgctcaccgcagagggtgaactggccatctgacacccagctccaacttcagggttgttcaatgtctgtgtgcagttgtgacaatggcagaaacaatcggtttagactttctctgcagaaggtagactgactcgggcacttctctatgttccctgacattgccagtcttaggaattggtcgtggggagccttgaattcaagcccaaagcaactttaacattcataaccacaacgcatctgtaatcagcgggacttatcatgagttcttgagctgcaaatggaaacggtggaaactgaacagacctcctaccacagacttcctgctgatccacctgcctcctcccttcagggccccttgggttgtaatcactgatgcaccattgttaggcggcagggtgatttaaggtgaattgggcctttgcacggcctgcttggttaaaagctggagcataagtcatcgcaccattctgtgtgcgtgtgtgtgkgggcatgtgtgtgcatgtgtgcacgtgtgtgcctgtgtgtgcctgtgtgtgtgtgcccatcttcgtcttccttcccctcccagccttccctgcctgggctttggggctccctgtgctgtgaatttcactttgctgggttacttccagtgcatgctgctagtcattcttgcttgacctttaaatttttctctttagggaaaatatgatcattagtctgtgttctccagcagatgtataccagtcacgggcagtcttcctgcttcacttcacatccatggggaaaaagtgttttaaagtcagtgtgattttttttttttttaatgacacagaaatgaatattagactagagggccgctctgtcgaatggctgtttggacaggaatcggggaatgcagcggggtgctcccagctttcacaaatgatgacttcagctgtttgggggtctgacttcttgcctgttggtgacacagtgtggctggactgtggggttcaccagccagaacttaatcctgggcttcacagcccatgcatgcatgagagagtttgacagatgtgggctgcattttctggtacgtctggatggtgagattgtctagaagggtgtgtttctggaactttccagtcaggcttcaccatggtgagtatttaatgaccacacacgaaagcctcattgccagggccgctccctgggacaaaccgaatcatagaatcatggaatttcagagctggaaagagcccctgagccgactgaaggggaaaagaacttccctgggagtaggaagacccaaattcggggctcctgccctactcccattgcagctgaacatgatttctgaaggaagagcatgtttaaaacgaaggggggcatactagccttctaccctttgttacacaaatacataatagtccaattcagcaatccaacagcgcaaggcttttataaagaggcatgcccagatagagttaggaatataccaaagcaaagcacatttctggtctgagatattttaaagtcctctcttggttttcggtgaatcctttggtcgatacagtagactttataaatgaagaacacaggcttgccagattatagtttctgtctgcctaaaaatagccttctttccatcccatgactgtcaagaattcttgcttgtaataaccccgttatcaacattactagactcataataatgactgtctcttcttgagtgcctgatacatgctatgccaggtgctttagaaacaatatgttggtttttctttttttgttttgtttttcttgagacagggtctcactgtcttccaggcaggagtgcagtggcatgatcatagctcactgcagccttgacttcttgggcttaagcgatcctcccacctcagcctcacaastagctgggactacaggcacatgccaccacacctggttaatttttaaactctttgtagagacaaggtctcagtatgttgccccggctggtcttgaatgcctgagctcaagcgatgctcccgcttcaacctcccaaagtgttagtattacaggcatgagccaytgctcctggcattgtcttgtttaatacagctttagagatgttttcattgtccttattttactgatgaggaagttgggcttggagaggtaaagatatttatctgagctcaccagctgaacttagattgctggctcctttaagaatcctgtaaaaatgcatacgaaacagtatgtacctattttttttttttttaaacaaagtggagcttcctgggtgaacatagagttgcgtatcatttaattatttgtattctcttgcatgtctccttgcgtggttaaaatactggtatatttttctttttttttctctatttttttttcacaaggagataccacttcgtacatctattagaagatttatttttatttttattttttgagacagagccttactttgttttccaggctggagtgcagtgacacaatcatagctcactgcagcctcgaactcctgggctcaagcaatccccctgcctcagcctcccaagtagctgggactactggtgcgtgccaccacgcctggtttaaaatcctggcaaacttttcaaaaacaaacattatctggcaactaatttttttatatggatgattttttttttctttttaattaagctagcttgttaggggcccagggcttctgagaattggctttgcacatgggaaccacgttcaaaggamggagaaagatgttgctgcccaagatggcaggtgcaggtgagggtgctgtggagggtgaggaggtgctccacatgcaaagccccttggggagcctgagagtagagaggtctgtgtgtgtgtatgcatgtgtgtgcgtatgtgtatgcgtgtgtatgtgtgtgtatgtgtgcgtgtgtccaggtatgtgtatgtgtgtatgtatgtgtatgcatgtatgtatgtgtgtatatgcatgtatgtgtgtatgcatgtgtatgagtgtgtgtatgtgtgtccgtgtatatgtgtgtgtatctctgtgtgtatatgtgtgtatgtgtgcgtgtatgtgtgtgtatgcgtgtgtatgtgtgtgtatatgcgtatgtatgcgtatgtgtgtatgtatgtgtgcatgtatgtgtgtgtgcgtgtgtatgtgtgtgtgtgtatgtgtgcgtgtatgtgtatgcgtctgtgtatgcgtatgtgtgtgtatgtgtgtatgtgtgcgtgtatgtgtgtatgtgtacgcgtgtgtgtgtgtgtgtgtgtgtgtgtgtgtgtctatacacataccaagcctgtttggttgttcaccgttgtgttagtttgctagggctgctataacaaagtactgcaaactgggtggctcgcagttctggaggccggaagtccaggatcaagatattggtaggttggttcctcctgaggcctctcttcttggcttgatggccaccttctcactgtgtcctcacatcctcacatggtcttttacctctgtgcacctccctgatgtctctttctgtgtcctaatttcttcttcttcctcttttttttttccttgagatggagttttgctcttgttttgcccaggctggagtgcaatggcatgatcttggctcactgcaacctccacctcccaagttcaagtgattytccggcctcagcctcccaagtagctgggattacaggcgtccgccaccattcccagctaatttttgtatttttagtagagatggggtttcaccatgttggccatgctggtctcggactcctgacctcaggtgatctgcctgcctcggcctccccaagtgctgggattacagttgtgagccactgcgcctggccctaatttcttcttacaaggacaccagtcagattggattagggtccatccactgttttgacttaattacctctttaaaggccctgtttccaaatatagtaacattttaaggtccttgggggtaggaataccctatcttttatttatttatttatttatttttgagatggagtctcactctgtcgccaggctggagtgcagtggcacgatcttggctcactgcaacctccccctcctgggttcaagtgattcttctgcctcagcctcctgagtagctgggactacaggcatgcaccaccacgcccagctaatttttgtatttttggtagagagttggccaggatggtctcaatctcttgacytygtgatctacccacctcggcctcccaaagtgctgggattataggcatgagccactgcgcccggccagaataccctatccttaaacatgaatttaggggaggggaggacacaattcaatctataacaactatcactggctgattttggcagaggcctgtggcctccagtattttgagggagctgagggccactgatctctccatatgctctcaacatcatgggactagtaggatgaaagcaagcctcagaccagattctacctcaagcaggcacacaaacattcatgcagcttctacttggagcctgatgaagttcaaattgtttgtcctctgaggctctctttgcatggaaatttctcccatgacagatgagaaagttctggggcagcattcagctttctagttggattaggcaacagaatcctttgaaaatgtstgtgcacagaccaggtggctctctgggccagtgtactctgaaagatgtgtgtcctggcctagctggttgaggaaaagcagggcaagcctagccaaatcacacatcttgaacagccctcattcgttatactaactttcccaccytctggtgtgtataggagataaagatggcagacgtgctattaggctgccaatgggagtgggctctgatatggtctttcaaatatgaatcacccctggcatgtgtgtttcctgtttaaggttctcaggtattacccaactgcaccaatattaaaatggacacataccgtgtcatgcagttggtgccgaagtgttttaagggaagttgtaggcaatgtgagtttatcagaaaacttcaccatatcagcattttgccctgagcttacaccattcccagatcaaggtacaagcacaatgatttcctttcttgaaaagttcaacaaaagcaagagagagagattggagttgatgctgcatttttattctgtgttaagtcttgaacctgctkttgctgaacattggtcaggggaatttgagaagtggaaagtgggcttttttcaccctttgaaaagagaggatggattcttcaccagaactgacatttaaaaaaagtcagcgtggcacgttttagtatgtgtggcagatctaaagagacaatattttgatctcaggagtgtttattcttgaaccattttcagaactctaagatttgagaaataataaaatattgaccatccttcaaagagaaaaacacagggcgatctttggcatagcctgtcattttgctcacatttcacttctctctctccaacttcagagcccctgctgtggaacaggtgctgtgctgggtggcaggggaggtctctggctttttttttttgatctccgtcttaacatctagcctactggaggaagtgtatttaatcatccacttatctgttaacaattatctctgagggcccgtcacattcagagaagattctaggttctctacaagtatcctctcactgtgtacatactaaatcaacatcctgctggatttcccccagacatctcccttcatcaccattggagagtatcctctaattgccagccctattcaccatactcatctcatttgatctggagttttctgagagtgaccgggggtgggatggacaggataatttagcaagagtgtataagtaaaatctatataataaaagttatctccctgtgccccccatgatctattctttatgtagcagtctgaatgagattttcagaaacaagaaccactttaccttagtctcttcttcttcttcttcttcttttcttttctttttttttagtattatggggatctgtttctgttgcccagggtggagtgcagtggtatgatcttggctcacagcagccttgaactcccaggctcaagtggtcctcctgcctctgcttccctagtagctaggactacaggtttgtgccaccacacctggctaattgaaaaaagaaattttttttcaatagagacagtgtcttgctatgtycccaggctagtctcaaactcctggcctcaagtgatcctcctgtctcatcctcccaaagtgttggaattacaggtgtgagctactatactcggccagtacccttctcaaaacacttcagcacttcccattgcacttgggttgaaattcccaccactcactggggcccacaagactcttcaagactgaatccttgctcaacattgtgacctgccccctaccacctgcagcctcacttgctgtgctccagccatgtggatcttcctcctgtctctaaaactgcctcaggtcatttgcacctgctgttcttcccaaaggctgtgtgatttccatcagtcagtcttagctcgtatacctccttggagacacctcttctgaccaaccagtccaaagaatctcctcttaycatgtcactctgttttatttatttatttagagatggagtctcgctctgtcacccaggctggagtgcagtggcgcgatctctgctcactgcaagctccacctcctgggttcatgccgttctcctgcctcagcctcctgagtaactgggactatgggcacccaccactacacccagctaattttttgtatttttagtagagatggggtttcactgtgttagccaggatggtcttgatctcctgaccttgtgatctgcctgcctccacctcccaaagtgttttatttattttaaaggcatgtatcactctctgaaaattagcttctttcttctttttccttgttatcatccatttccccgaaccagaatagaagttcctgaggccagaacttctgtctctctgcccctcactatgtgtctctggcacataccccagtgcctgcctgctctaaagtaaaatcttagtaaatattactgttgactaaataaatgaataaatcccttttaatgccctttggaagttgcaagtaaagaataggatccctttttaagattacacttttggctattgatctgtgtgtctggaacaagatacagtttgaagatactaccatgggacatgacatcagttgagctgattaaggttttagtaataagaatccaggatgtgtccgggtgcggtggctcacgcctgtaatcctagcattttgggagaccgaggcgggcagatcacgaggtcagcagtttgagaccagcctgaccaacatggtgaaaccccgtctctactaaaaaatacaaaaattagccgggtatggtggtgtccacctgtaatcctagctactcaggaggctgaggcaggagaatttcttgaacccgggaggcggaggttgcagtgagccgagatcacaccagtgcactccagcctgggcaacagagcaagacccagtctcaggaaaaaaaaaaaatccaggacgtaactgaggaaaatgaagtggaaatgaaatgcacacttacctatagctgtgtttcctactgtcagtgaggtcagatgtttttgaccaaaaaaagatcggaaagtgaaataaaactaatggaaatggtgcacgatggctcagtggtttgcaagcaatgcagatggcctcagccattcacattcaggcaggagccgctgatcctagtgtttaccttggagctggtatccagtaatgtggcaagatgtttattgctttctcatcagatgatggatgtggaagagaatgtttttgccctggaaccaggtaggccttgggctacttaatttgctctttaatagacataggtgttcttgaagtacacctgtcattcccttaacagagcacctatgaggtgccaggtgctgagggttcgttggtgaatgaagtacattttgtggcttctaatccagtggctttggacatgtcctggtgagaggggtggaaatagtgtatgcgaatgtgtgtcaaatgcctcagaagtgggaaatggagggagagtttgaaggcctgaaggcgttccatcaaagcttccttccttgccgtctctacccttccctcaactctggctcaggcaaatgctcaaagtgactcaccctggtaggcacggaaagacaagagagacttggatgtagaaagacacatttacagtttgtggagggccgtcccttcggacacatttcatcagtgggtgtgatgctgcctgtggtatcacatgtgcagcagcagggtgttcggttttgttttttgagactgggtcttgctctgtcacccaggctgaagtgcagtggcaccatcttggctcactgcagcctccatctcttgggctcaagtgatcttcccaccccagcctcccaagtagctgggactaaacacacacaccaccatgcctgggtaatcttttgagatctcactgtattgtccaggctggtcttgaatttccgggctcaagcaagccttctgccttggcctcccaaagtgttgggattatagtgtgagccaccgtgcctggcctaacaagatgtctgtatgtgaagccacattcctggcccatccacagtcacgaggacttgggactacaggctgggtgacaaaattgagctgatttccccaaatctccaaggagatcccctctgaagagatgccgtgccgatgagagacagagcctgcaccacgaagcaaaggsaggagcttgtgagcttgtgagctgacccctctggccttggcctcttagtgtctatagcccgtcactgccttaaagccaccacatcacatgtcactgttcttcaacactgctcttatttgaatgtctcagtgataacatctcagaaatgaaaaacagggtctccacttctgaggatgtgacaagtgagttggaggcagtttcccaggggaaggatttttgtctcaaagcattaaaatagaatccgttctaagtcagaatattccttttaaagttaacttcacaaaacttctctgatcttgatcctcttgctagcagctgactgccgaggatgggttccagcgcttctcagaacaatgtcgtaggcgtattagctctgtaagtcaccacgaattcagaataataactgtggggtggggtgcgggctcactgattgactcrgaggcatctagagttcattttgtaaaacacttaaacaattcagggtgttttgttttgtgggtagatttttaaaaataattttaaaaatgtaaaattgtggttaaaaaagcacaatgtaaactttaccattttaatcctttttaagagtacgggtcagcagtggtaagtatattcatactgttgtgcaacagatctccagaacttttttgttttgcgaaactgacatgctgtacccactaagcaaacaacaactccccattttctcagaccccctgagcttccagtaaccaccgttctactttctgtttctatgagtttgataacttgagacacttcagatgcgtggagtcatacagtatttctgtttttgggactgggttattttgcttmgcttaatgtcctcagagttcgtccatgttgtagcatgtgacaggattccttcctttttaaggctgaataattcattgtatgtgtacaccacattttgtttatctgttcttcagttgatgggcatctgggttgttcctgtgtcttggctgttgtggatactgctgctgtgaacataggtgtgtaaatatctctccggaatcctgctttcaattcttttgaaagaattgaaagaagtgggattgccaggttttgtggtaattctattttaaattttttgagggcccaccacactcttttccacagtggtcgtgccattttatattcctaccaacagtacacaagggttccagtttccccacatccttgccaacacttgttactttctaattttatttttttttgatagtcacagtcctagtaggtgtaaaggaatatcttattatggttaaacagtgtagttttattatttatacttcaggtaaccaatacataaattagtactaataaaaattgataactactatttattgagtgcttattaagtgttctaagcatcttgcatgacttaattctcattacatctctgtgaggaagaggttccatttttacccattttatagatgaggaaattgaggcttggagaatgtaaggaactcatacaaggtcacacaacgaactgaagcctgtgcctggatttgaacccaaccgtctggctactagggtgttctctggctttcttttcctaattgactatgctctttaaaattcacatcttcagctgacccatatcaagaaagttatagaagataatgacatcctgactcctgaatggagttccttgaagtgcccaggaatgaaaacttggaataaggcccatgcctcagtcatcactgatgcctcggatagcagacttaagcgagggctttagaaatagtggcctagtctcctaagccctgggcttgtaaaatactctgtacttttttggtttgaattcccttgttaaatgaataatagaaaatgtgaggagagaggcacaacatttttttcttgacactattccactttgagtttggtttctattccaaatctgtgtgtgtgtgtggcagtggggaggaaggtgtgttgatgagttattgttgcattagaaggttcactcttagagccaccagattttctggaaagccatacatgtgctataatgcctgtcaaataaaaaatcaatgtgacacagttggtttaatttttgttaatctttatcatatttaattttgttttttgactagacctaataatgggccagaggcctttaggcactgttgaagtgactgctggccacaattccccaaatcagctgtaatgtttgtgttggattattgtattaacaaatgcttcaaattacattagaaaaaaatccgttatgttattttaagttgggggaccaattccacactcacatctggtaatcctatcagtaaataatggcacagggccattctaacagggccaattaagtctgcagggcctctcttcactctttgatatgttttgtgaacatttttcttattttggtgctatgaaatgaagtctctgtcaagagctcaagtcatagactaatcctcaaaactttttttttttttaaacaagacaaagaaaatatgagatgttgtttcctgcaacaaaatcctagagagtttgtaggatgttttatgtatggtgtgttttgaggatcgtggaactgagaaatccacaagaatttgccatccagaaaaactttccactggaggtggggaagaggggcctgcttgactccctcatgggctcaggcctacctctgcagttatgattgtggataatttagcccctcttgcaacagtgtggtacttgctactctcacctctgacttgtggatgagaatacctgcctcctgggacctctcctggatatcaagcccctggtttctgtcataagacgttcacttaacaggtgctatacctcaaaggacagatattgtcatttttgtttgctgcaggcttaattttgttcccctaaagttcatatgttgaagacctaacccccagtacctcaaaatgtcactacatgtggatatggggtcttaagagagacaaataaatgattatgaggtcattaggatgggccctaatccaatctgcctggtattcttgtaagaagagaaaatttggatgcayggaggcaccacggttgtgcacgcacagaggaaaggcctcatgggaggacacggcaagatgrtggccgtctgcaggccgaagagaaaggccccaggagaaaccaaccctgcttgacaccttgatcctagacttccagcctccagaactgtgagaacgtaaaattctgttgtgaaagccacctactctgtggtattttgttatggcagcccaggcaaatcaatacatgattaaactcctctgatgcttaagtacctcacgtattaaaaaaaaatgtttacatcctgttttctctacactgtttccttggtggtttcttcttaagttgttttctggggttttccatgaggaaccaaagtctcttggtctctgctaaccttcttaccgtatgtccacatctgtcttctttctccctgccttgctgagaacctgggtctgtgatagtgggtgacatggactggagagaggggaccggatggtaacagtgtgatcagcctgctgtttcttcacaagctgattacatgcagacaggtgcatatggggcaagtgctcagggtcccgctccaccctgcatgtgctgagtatcttcctgccccctctttttttttttttttttttttttttgagacagagtctcactctgttgtcacccaggctggagtgcaatggtgagatcttggctcactgcaacctccgcctcccggttcaagcaattctcgtgcctcagcctcccgagtagctggrattgtaggcatgtaccaccacrcttggctaattttttgtatttttagtagagatggggttttgccgtgttggccaggctggttttgaactcctgacctcaagtgatccacccacctcagcctcccaaagtgctgtgagctgggattgcaggcatgagccactgcaccagaccctgtcccctctcttgttctgtcctacagctccagggctgttaggcttcacctgtcatcttaataacagttgccatctctgtcactcttctccctcctgggctgggggtggggcaaatgtaagcttctccacttccccaagcatatgggtccattttattttaaaggctttattgccaatcatgactggggaatagtcagataggatcggaagtgactagattttaggggaattttaaactgtcagtggggcttaacctcaaaccactaaaaagccagaagaacaaagggatgtgtacaggaaggctggggatggtgttagcgcctcatgactgggataatctactgtggagttcacgggagggccaggccttcaaagatgcttttattgaaaacgtccctataggacctttttcactgagagtttcacatctgggttatccaacttgttgggaaagggtcttggttatttgtgcaactcttaatgatttccgagagagcctgctcaagcggatgtggggtggattcagttcaaagacttggaacacttgaattagccgttgattttaatcgtcttttgcagccgataacattaagggtttcttttatgaacctttaatacgatagtttttaggtagtgggagagaggagttgtttttgttttatatgcttttccagaagaagaagaaaggtgattcaactttgaatttcctttgatcttttcttgatcttcttaacccgttttcagaatggctaccactctmcctctccagaactttcagtggctcactattgccagtcctcattcttttttcctcccatggctggtttaatttagatctccctatctggaatttgatttctttgcagcagggaccatgattcttgtttttcagttcacatggatcccagagaatagagtaacactcagcaaatacttcyttttatgggagagggtgttaggtttttaaaatccttttctcataggctgttagatttgatttactgcttcgtacctgggctttctgttgaggccaaggggtaggagtgtctttgggagtgcatcagagtccgggtgaggcctgtgaccagccagtggggccccagaagctcagttagaactgcttgtacctcctggtcccctgccttcatggagtggaaagggatgaattagggactccaartccaggtcctgggctgttctccagcccaccctaagcctggagcagcaactggtgattgggccattaactttatgtagttctggggccagactgtgtatcctataaccttggcctcagcaagaaaacattaaaggggagacctggagaaaatgtgctttgataaatagatacaaattcatcctggtgggtcatgagtggaaagaaatcattattatgtaaatcaaatagacacttaagtctggacagcaggtagctcaacgctggaagagttcacaccaaaaaaaaagaaggaaaaaaggcaggaagggaaatgatcaaaaataggggtgggttttctgggcctggggctgcctccggtcctcagtgctaccttccctcattctgcccctctgttctcttgctgtcctccttctgccccctgtggccatgggactgcccccacaggttctggggacattttctgagccccctgcacctggtacagccagcccagggctcagtgggggaagtgctccatcagtatttttttgatggtggtaaataagattcatacagctttgcagtgtttgattgtggacttttaatctggcaccccaggtgacccttaagctccttctatttttccctgtagctgtcttttgagatgcatttgctgggccttgttaatggtttgttttttcccttttgatttattagattagaagctcagttcttggcctcccccttcctgggagaagttcttgcttcatctccataaaacgttgctcttgggctttttcctgttttattacttagcattaatacctggcagcttatatctgagctctcattttattttcgtaacatataatattgcctctcctctggcagccttggtgcttgcgaagggtttagtggcctcttgtttttttacattgggaggtaagaatttagatttattagtcccagcttggcratgagtggcacagagaattttaaatgatttgttttaagccacgtagctaatcaggggacaaaatgaaccaaggatactagaaatgaacgagcaaggaagaaggcaaatgaacttctgacttcttctaccctttgatgttttaccaacacgagacttattcgttttttagtttggtatttmtctgtgaaatgagcagaaagaatgacatgagctaagagaggaacaaataggcaagggatttgtgaacacagtgctctgataatgatgacattggctctcttgaagctacatatatgtttttccccacaaagtctatcttagaagaggagttgcaaatcccttgcaagggagggttatagttggatgccaaagtggtcagtttttgacctgggtttggtgtggggtgtgtccacagagctttagctttcagtgcatctgattctgtgaaagaaataagaacggagtagtggaaatgaactattgcggtaggttggcaagtaagtctggtgacgttagggagtaaactgggaggaagttccctaggctctgatctctgtaggatcacrggtgggagggcaggtttgatctctgcccttgtgaggaggttggatggagccctttgattccatccctacctccgctagctcagcatttacagcaaacagcacctgctgttcaggacacttcattatgccttcggagtccttcaggatcttgaggatcagagggtatctaagtttttctgccttataaaaaagtggaggagcttttcagagcattctagaataasagataagactagagtctgggaacggagtagaaagatgctcaaggaaggactcctcttccttgtttccacagctgggccacaagcccaggtctcttttgcctttgactgtacaacctgctgcctgggagttcctgggagggacaggtttcagagtgtgtccttgatggacacayagtagagccctgggatccaggaagtaacaagagggcacttcccagtccctgaaagcaaacaccttaattttgctaggtaattttggggaggcaccaaacctgaaggttcaggatctgaagtactttttctccctcttaggaaatgtggcctagcatttggtggtcatgttcaaatcctggtccagtcacttactagatttctaatcttgggcaaatcgcttagctcacagatgctcatttgacctgcaaaatggccccaagccgacactctgagcaccctccttggcatttgtgattattaaattccataatgcaggtaaagtgctcagccgagagcctggtctggtatttatagtcagcctggagaaaatgaactcatgagttatggtctgcaaacggtgagctccttcaggtccacccaccagatgctgggtgaaggagtcagcctctctctagccaggcagggaggctgagagcctttgcagaaagaaagtcattggcaaatcagaagtgccatccagtaaaccctggcttcagtcactgtggaaattgttaatcagacacgtggcccttgctgattttagggtaaggcacagctgtgagcaaacagctcacctctttctctttccctagcagcacatgagtggactcctaggacaccacacgtgtgacctcaactgttctttccttatttcttcttttttacttttttttttttctaggacagtgtctcactttgtcacccaggctggagtgcagtggcatgatcatagctcactgcagcttgaactgctgggctcaagggatcttcctgtctcgacctcctgagtagctggggctacaggcctgcaccaccatgcctggctaatttttacatttttttgtaaagacctggggtgtggcggggcagtggtcttgctgtgttgccaaggctggtcttgaactcctggctttaagcgattctcctgcctcggccacccaaagtgctgggattatagatgtgagctattgtgcccagattcttctcttatttcttctaaatgcttggcttttagaacagtctaggaaaataataattggccagatgactcagttaataaagatgtacatttttcgagtacccattggttgctgtggggaaaaaaagtcatctcctcagattgctagtaatttaattggaaggaaatcagttgatttgtgagtgatgatttatctccactccctctgaaattagtcccttaacttttagccctactccccgcatctgagaaacaaggtgatccagatggagagagcaccaggtgttaaattgggtagctgatctacgttccaaggagctcatggtgcaattcagactgtcaagtgcaaactgagttaagagagacaccagcgtggggcatcatcaggaaagagttcatgaaagaattttaacaatggaaagttataaatcttcagttagaatccaagcactacsgaggcccagaacccaggagaggagaattcagaggcaggcccttctactgagtcagcaagaaaagtgccatatcagcgcccctcaaatctgcacatgcataggaatcgcctggagttctggttaaagtgcagatctggattcagtagatgtggggcagagctgggattcggccttgctagcaagctcccaggtgatgctgatgctgctggcctgaggccacactttgtgtagcaaagtcttacataatatttaggttagagagtaatgtatagatgcaggtaatatgattaaaggtgctcattacaagagagaaggagctgttggtagatgggagcaatatgcccatccagacatcgtcagggtggtgcgcgacattgcctgtctctatcctaaccccagatctgctgctgcctggctgtatgacctcggacaagtcattaacaggtaatgtgattaaaggtgttagttacaagagagaaggaactgttgttagatggtaggagtatgtccattcagacattgccagggtggtgtgtggcattgcatgtctgcattctaaccccaaatctgcattctaaccccacacttcctggctatgtggcctcgggcaaatcgttaacactatcagagcctcactgcacacctgcaygttggggctggcatttaatacccaccttctaaagtgtgtgcatgtttaggaataaaagagcaaatccatgtaaatgcttagaacagctcctggcacacctcaagtagccaacaataagagtctttccattctctcacttgggagctcctcttcttactgggacttgaccagtgagaccttccgtgcctgggccctgtatcttgtgtcccctagaggccctgcaggactgggaagctggcctccgctctcctgattatgatggtgcttcctgatcttcctgggagttctggccaccaccagtgggacatcagcacgggacacagttagtacccgttcgctttctctgtggccagggattgcttcaggaactgaccagcggaagccaaggaagggctgtgaatgaatgcatgaggacttatggggagaaaaagaaaattttgtgtggagaggaaaaaaagtcatcaggcagattcctgattaaaaatggtaaaatgcttttggactcaaccttgtaattttgggctcagaaagctggtgaaatgagatgtaaaatgcctcaaaagttggacgcacccagtcaatgttagcttttctttctggctctgcagagaacattccattgagttttctccatcaagataatcattctcactctctaggtcttacctgggtgtaccccacacccccagggcagtcatcagcgccttgctgtggggagagttggtggctgggaggaagggctcctctgggcccacttcagtgcctcccatagttttgcagcggcagaaaagtcccatttctccccgactgctcatggctgaagcagccctgccttgcccagcttggtcgagctgtgttaatgtaattagctcactggcttctcaccggggtggactcaggcgcagtggcatgtgtgttaagaaaaccagatgccagactcctgactctggcactgctgagtcctgtttcttcgatstcacctcagtggcagcaggtgggcagcccgtgctgggctagatggctgccctgggagtctgaggactctctcgggtctggtgacttcaaagtaagctgtaagtgacacatctgggtagggaggaggcctggggcacaagaggtcaaatcctacaatttagggtccctgggagtgttctcgtctagtgattcctaaaagcctgttcatggcctaggtacatttggatcttttgaggatcttgtttaaaaagcgggggctgagtgtggtgggtggtgtgcgcctgtagtcccatctactagggaggctggggtggggtgatcccttgagcccaggagttggagaccagcctgagcaacatagtgagacacccatccccctgtcttgaaaaataagcaacatctggggccccattggaggttctgatttggtttgggtggttggagtgggggagggggagccttaatcaatattttaaaaatgactcccaggtgatcctcataggcagcaaggtttggggaagccatgccagagtccagccttgcactggtgctgaatgcagaggtgcaagtctgtgattctgtcaccagagcatgtcagtgacagacctgtagccaaacccagaccttggaactcagaggctcttgttttggcttacagacacctattagactggcttctgtaatttttgcccacaaaccccagatttatgccagaaattcagcctggcagaacagcgctgttatagacaccagcagttctattctacctgggggctatttcactttcccaggggacgtttagcaatgctggagacatttttggtcattatgacttgtaaaggggtgagagttgctactggcatctggtgggtagaagccagggatactgcatggaacagcaccccccacacccccccagcagagagctaccctgcacatgatgtcagtagttcagaggctaagcaaccctattctagacgaacgtttctcagacttaactgcactcactgggtcctgatttaataggtctggggtgtggcctgagagtctgtatttctgaaaagctcctgggttatgttgacgctgcctgtctggggaccacactttgcatagcaagttattttcagagcaattgatttcagagtgactyaggagtgggttggagtcacagctgtaccatcaactagctgcttgatcttggacaagttaytttaacctctgtcaccttaagtttattcatctgcaaaatggagatcatatcacttagggccaaattagataatatgtgtaaagagcttaacacaggttattggccttggcaagcattcagcaaatgtagccgttcctttcactccgttattatttgcttagcagttcagctttaattgtccattgtttcattatttacctattttgtgtctcatgctttgctataaaaaaataagatgaggtgggaggtgattgaaagcattatctctgtgatggtgagttataaagattactagcattgtttttactcctaagtcaccacaccttctgtcatggggtgggaagtgaggctggaataggacttaaaatcaactccaagagaaacattttgagaactggaggcatcaccaagtcattcttcaaattctggaaacatggtagttattctccactcactcaacaaaagtgactgtggaaggaatgtcccaaaaatcaggtgtctgatctgtgcgtttccattcaccatggttttagggaycatagagaaggatgacaagcgaacgcagatamccagtttcatcagtgtcctgaaatactcaagtcacctattgcaggagtatttcagagtgagttttgagtatgggattgagctttgttcaaagtccaacattgccacgtattagccgtgtgacctggggttatataacatcacaaagcctcagtttcctcatatctaaaatgggaacaaaatagtatctgcttctagagttgaagtgaggcagaggtgagatgatgcatgtaaattactggatgacttgaccaggatggacggtcctgcacattagaaaggctgttttcaaatgttggagtgggacaatcacttggaaacttattcagaggtccccctcagatagtcgattcattagggccaggatgaggcttggaatcaaacaggcaccctcagggattctagctgtgctgtgccactttgagaaacctagtccaggtgctaaatttacagtgatcaccttgggattctggtgtccgacaragatggaaacttcgcaggaaatgttccccaggcgggagggctaagaggacacagtaactcttgagagttgctccgacagaccttttattttggcaagggcttgtgctttctttgccaagccrtcattcgttacttggctagaggagggaccacagggaggggagaggggacatatacagctggctgtcagaacagtcgacctctaaatgggataacctcagagccaggcataagcaatctggaaacaaggaggggaggtgatggaaggtgggagcagaggcaggtgctggagacattgctgcagacttcctggaaggggttgccaagccgggaagattcagaggggaagagcacagctggggagagagcccctgctggctccaggtgctggtcccagaaggcatctttggagggaagggtctgagctgtgacggttcagtgcagggacaggtggggtaagctcaggtgtgccgggctccctgtgcgtgttgcagagctcccggggagggcaaggatgtgaagtgcgagcagatggtctccgtcactgccaacctaaatcaatgactggagagggcgaatgctgccaattagcaggatatccagagctctttctcccagcccagtggccccacctgggagccaggcagcatgctttgcctcctgctgagacagatcctgcttttgctgcttccttgagagaagttttaacacatgaaaatggctaagagcaaaggctttggcaccgctgcctgctttcagattgctgcttttgctagccatgtcatcttgatcctgtttcttcccttctctgggccttggtttccccatttgtaaaatggtaatggtggcaatagtactcatcagttattgccaccacaatgctgcccagcaaactacctcagtagcacacagtagtaagtgtttgttgttcacacatctgggctggccagagggctttgctggtcttggctggccttgctcatgtctggatggctttggctgaggggaatgactgagatgatttgtctcagcttcctgtatctctctcatcctcctctagtggtgtagcccaggcaaattctcatggatctggcaaaggtacaagagccagtgagccactcatgtaactgcttttaagttcttttctcacccgccccccaccatgtttgctgccatcccattggccacagcaagtcacatggccgagcccagcatcaaggctcctggcagactgcacttcccaggatggcactgcagagtcacagtgccaaggtgtatggaattggggtgttttttgcaatctaccatgagtactaacctcacagtttcgtatgcaagcaaatcctcatccacttaccagtcttaggacagaggatcctcactggtctcctcgaccttgagacacccagattaggaattcttttctcctctgacttcttgtagttccctccrtatactgttctattacccccgtccatgacacctttgtactgctgttccttctgcctgtaatgcctaccccttggcttacccatctgatcaactcagctctggggtcagactgtttgggtttaaagctggttcatgtcatttatttaaagcttcatgaccctggcaagtttctcaccctctctgggcttcaggtscttcctctgtaaagtaagtatcgtaaccttcttccttctctgccagggttgtcgtgtggattaaataagaattgtaaagcamgtatcagtgactacaaaaaacaaaaaggaaatgctcaatagatgtttgcttttgtaaagcagagtttacattttccctgttgctgttgaagcaagggtgtgcatcatatccaataactgggaaaaacaaagcaaaataaacctttttaaccttgagatgtgtcagaaataacagggtcactctgtctcattctggtcccctgaataaaggaaatcttgaccattttccataagcctggattatccaaccatcagctttatccttaacttggcaatgatgatatgattgcttcttgtggttatgatcatatatgagaaatgtggcagcagcagaggtaattatctcttgtgattatttatgtggtgtgacagtctttcttatagctggtccccctgaacctctttgcaagtaagattttttctttcttaaatgcttttctcttccttctatgtgttgctgctactgttactcctgctgtttctaccactaccacaacaaccaccactgccgcgccaccaccaccatcactaccaccactaccaccatcatcaccaccatcaccccagctcaaccagaatgactataatccttcacacccctgccrggttatcttccctatgatgactttcttaaccagcttcccccaaacaagtagtaacattttccccacccaaatccatcttgaattgtgggaaggatcctgtgggasgtcattgaaccatgggggcaggtctttcctgtgctgttcttgtgatagtgagtaagtcttatgagatctgatggttctataagggggagtttccctgcccaatctctctctttgcctgctgccatccatgtaagatgtcacttgctcctctttgccttccaccatgattgtgaggtttccccagccatgtggaactataagctcatgaaatctctttcttttgtaaattgcccagtcttgggtwtgtctttatcagcagtgtgaaaagggactaagacagcattctattattttgtatcttgtacctgcttctgttttaacacagtgtatttgaagtacagtttttgagtctcctgttttcccctatataagggggcagaaaacatgtctctgtaccttaacatctaagagaaggatttggcatataatagatgctcaatttatacctgttgaacattgatagaggaatttcatcttactctcgtgatattcttgttctaaaaccaaaaattgcagtaaaaggcccccgcccccacaaccatggttgcagaggtgtrgaatagagtagaactcatgaatgacatgagacattggaattcatggataggcatatgctagcaagcctgagatccagtggggcctctaattttgatatttataaatggactttccatattgcctgtgttatttaaggtaacatgaacttctgtaacgtaagccccaaaatcttggtgaatgaacacaagaaaaacttaatttcccactgatgtgaatagcttagagtaggtgttcttggttggggaactctcctccatttggtgtttcagggacctaggctccttccatgttgagaatcttccatctttaacacaggctttcaaggccacggtgaaggtcatctacttttttggcatctagctggaggggataaggacattgagcttactgaatcaggcccagaagaggtccccatcacttcttctcccattccactggccagaacttggtcttggggaggctgacaaatctagtcagccatgtgttcattttctgtttagtaagacctcacacatcagtgtttatgcaggagataggccaaaacatttttttttacacctctatctgtttttctactgctaaaccaatcttaaccaaaccctgcttccatttcatgcaatattggctctagactgcagccatgtgactaaaagggggcccttgaaccagaaatgggggaagggttggagactgtgagctgctgtttgcaatttatgcatgatgaagataagaatgttacttcgtgctgttcttagaacccagttcatttttagactgaatgtttatatggctgagagctgcaggaaacaccatgcccaccttgcttggtttaaagcctttgagatctatggtrgctgaatgtgcttccaggagcagaatttaatgtgcagggagtgggtgactattaaattcagtgactgcagcaaaactttgctccttgctcctctttgtggaaacactgtttgtacagcatgtctttcataatcaatacaagggagacattaatsaagagaatgtcttgtttggcagacaaagccttccctttgttcggattgagatgctcagttaatttcctgggagtgtatttatgagaagttggttagtgattcttgtaagtgtatgtgagtttcttgttttttytttttttaagagaggagtcaacaacccattgtattactgtaaaawatttgatagcttgtactttgaggaatrtactcatgagagcctagtcttatagatttgggatatttatacatactttaaaatgagtaggttggaggggaactttaaatatgtatattttacttaaaaaaataaaagcccaaaaccttttgtttgaaatgaccataaatcaaagcrttatgggagataaattttctagactttgtgtgtggaggaagttcattgagaaagataaggtggacaaaatgctggagaagtttgggacaacccctgggttgaatcagtctccactttcagagagtttatagcctaagttcccttccctttttcaaaaggaattttcatctgtcttgtttaataatagaatctcttcttcctcctcccagccttctcctcacctcccttcaggcaagcagggacttccttctttgcattgctcaggaaattatgtttcccacttgcgaggctggccagcaaaacttctttggaagttggagaagaggatgccagtttctgcctttctgctttctgctcatagaaggctcgtgtgatatgttatcatccagtcttgctggctttcttctgggtcttctggcttccctgagtttgaatctgcattatgttacagcaartgcagttgacagtcagtggtatagttggagcatgcatggcccatttcatggcttttttagtatgctgaatgttatgccacctcggctaggtcatgaaatcgtttaaacaaaataatgctttggaactgaaatgttctggttggtgagttttctggtcaatggaagggaatgaccttgggcagagtctgtgaccacaagtgaattatctatccttgcagagcctcagtttcttcacttggagactaggcacactatcactttccttattagggctgctgagagaatgtagctgaggttccttggctacttagcaaatgcaggactcagtaatggtaaccacagtcatctctgggtatccatgggggattggttccaggacccctctcaaataccaaaatccaaggaagctcaagtcaatgctatgaaatggtatagtatttgcatatagcctacacacatcctcccatatactttaagtcatctccagatcacttataatattaataactaatataatgtaaatgctatgtgagtagttgttccactgtatttttttatttgtattttaaaattgttatattttttcccctacatattttcagtctgtggttgatttaatctgtagatgcagaacctgaagttatagaagactgaatgtactattaataattattaagatatacaaaatcactgttagtgagagatttaaaaacatccagggtagaaagaaaatgaaatagactatcagaagcagtaattttctggtatgattttaattagtagcgctctacaggatcctttgtggaggcaaatgcattctagttagtagtatctgtgatatcatttagggctcctgttttatagattcagttccacaaatatttattatcgagtgcctgtgttatgtcaggtgctgtgctaggaactgttcagttaaataggtagtacagttaagagaataagtcagggtgttctccctcccaggccttagagttggggtgattgtgtgtcccagttttccctggacaatcctgtttactgctcttgtcctagcataattattcacagtgccccttttattttaagtgtcctggtttgggaaactaattatagggtcatcaatataggctattattgaggtagagggagtttctccagaaaaggactatggaagttctctaaacaagaaggagcatgatgaaaagtattttttagggagttgaattcaggctagatggtaggaccagtgaagaggtgggagaggggaaagcattttggagatagagtaaaccaaatactaccaatgtgatggacagaacccaactggaggtgccatctggaattccagagtgtgaagagcagcctcaggtgcgcagcctttttaggtttcaccaatcagcatatctcakatgttttcttggagactccattaggctttaacaattgccttaaaaattccccagcaaaagcattgtgggaatagggaacaactccaggttgcacatgagatgcttagctaggtcattggtttgtatggccatttccctcctgagtctaggtatgcaggtcttgaggggtggagctcaaggctacttttgcatttctgccagtgcttccaaatgtcatgactggggggggggggggttgggggtggggagggagggagaggtgggccagggtagtacccttccttgacttagtgtttgaaacttgaaacacagaaacttagtgtttctgtgccatgtctcacatacacagagagaatactggttgcaataayttcagagacagttaaaaggtratattttctatattcagagattattaaattcgttagcaagaggaatgcagttcagacttctcagatttgggaggtaaatctccccsacccccagtgtttgcatttggtttgagtgtcttaattaccattccagaacgtttgtgaaattaaggtggaaaaaagaattctggcttaggtactaacatataacctttgtgtgtttattatgaagccttcatctttaagattctcgtttgcaatcctgggcaacacaaccaattttctgtgtcattaactttttcctgtaacaccaaagggcaggaggatgctggtctccaccttttctttctccaaggcaagttgaacgaccatctgtgccataagatggatgakgcccagtgatcctcttgttgatttggtatttgtgtcttcccacaagaatctttgctgattccaatgctcgattcactggaatactccctgctgttctctgaattgatgatggattagttgaggtctttgtattcattattggcaaggtttcgagacagtcccttaagtgcaggaagaattctggcagtggcgtcagaaggccaaggctcggcaaccttggataagtcactgtctgagtctgtttgtgttgctataaaggaatacctgaggctgagtcatttttaaagaagagagggttagagctgggcgagtgctgtgggcttagcaggggctgcagggcagtgggagtgcagacttaaaaaatgcagacccccggggcactactcatttctctagctctggtttactgtggtaccaggggtctaatcaggcctgtgtctgcctccttcttgaatagcccagagaattcatctaaacagccttcctacagcagttccctactccaggtggccacataggagttccagaccagtgttgtctccggggacattgacacagcagccaagtttattggtgttggggcagccacagttggtgtgggtggttcaggggctggcattggagcggtgtttggcagcctgatcattggctgtgccagaaacctgtctctcaagcagcagctcttcttctatgccattctgggctttgccctgtctgaggtcatggggctcttctgtttgatggttgccttcctcatcctcttcaccatgtgagactctgtgggggtcacctgcctgtccctgctgctacgactccataccattactggtgctgggatgtgctaagctttacaacatttctctaaaaaaaagaaaaaagaaatagaggtttacttggctcacggttctgcaggctgtacacgaagtatgacgtcagtgtctgctcttggtgagggcttcaggaagcttccactcaggattgaaggcaaagaaaaactggcttatcacatggtgagggagggagcaagagagagaggggaggaaggtaccaggctcttcttaacgatcagctcttgtgggaactaacagagcgacaagtcactcgttaccccaggatggcaaggtctgcccccatgacacactaggccccatgtccaacattggtgatcacattttaacatgagatttggaggggacaaatatctgaactatatcaatgagtcactttgtgcctcagtttcctcagcggtaaactggggtaaagaaggatatgaagaaccaatctgttagggtcgttctgaggatgaatgagatggccattgtgaaaggactctgggtcgttttaatgtggtgtcgtattattggatgaagcatctaagttcatgactgaatctagcccgtctcccgcttttgtatagcctgtgagctaagaattgtttttacatcttaaaatggttgggaaaaaaaaatcaaaagaagaacaatatttcttgacacatgaaaagtctatgaaattcagatttcaatgtccttaaataaagtttcgctggaactcagccatgctcccttgttggcgtactttctgtgccacttttgtgcgataatggcagagttgaatagttgctccagagactgaataggcctgtgaagctgaaggcacttatctggccctttacaggaaaaaatgtgccagcccctgatgtaggacagtggttattgttcatcttgtagcaaggtgaatcgcgttctacacagaggtctttccctccgatggtgttaaagcttggggaaagctaaggctctcaaatttctgaggaagaaatcaaagctagtttgttttttcattcattcattcattcattcattgtttcaccaaatattctttgagttcctgctgtgtgccagacactgttaggggtggtaaggaaaatgcagtgacacaggagaaaatgcctgccctcctggagcttacagtctagggggaggagtaagataatacacaaataaaaactcctgacccgcctgagggtgatggatgatatggaagggcagggggagagagtggggactattaggaaaggccatactgagaaggccataggtgatgtgaaggaggtggggtgtgagccctgaacctacatgatggggctggggcagcggggagtctgcttaggcagagggcgaagcaagttcaaaagccttggggtgcaagcattggagatggtcaaaggagagcaatgtgcatagagcatttttgtgtgtattttaatttcagcattggctacagagctgtggtaatctgatatgtgatcctgttttaaaaaaattattttatcttcagaacaataggaaacacgaagggagaccatgtagtgcagtggttaagagaaggagttccaggcagataagagttgaagctcaaccttggcagtattgacatttagrgctgaacaaaatctttgttgctggaagctgtcctgtgcaatggaggcagtttagtagcattcctggcctttactcactagatacttgttgtgataaccaaaaatgtctccaaacaatgtcatatgtcccctaggggcaaaattggggcaaatgttagttgagagagcagagaccctgactctttttgtctcctgttcaccttttcttcagcagagagcacggtgtctgttcatatcctggtgagaagtatacgatttatgtgattggctcagatccttgtgttaaaatacaagctactaaaatggtcatctttgcaattttttcattgcctttttttctcttgctagtcatcatcccttatgtgaagcaatgaggtggatatcatttcctccatccacttttaggcgtggttggaattggagggcttaaggcttacgaaaagtgcctgagcccctgagtccatgcttttggcccatctgaactccaggaggggagacatacagataaaagagtgaggtgcttttatagtgttcctctgaggctccctggtaacatgccatccattgaaaattggcctctttgcctgggggagcccctaggatgagttgatacctaagtcaccactggscatgctgaattaaaggcatgccttgctgtaaagaggaacggaagctcagggcaccaagcagaaggggcacattaggagagcctagcagaaatgtatttttgaatttgtgtgccctgttgggctcatttggattgatttcctccactctaccttctatcctatgcctaagttgatcatggagcaaaatgttcctgtttgttcttccttctagagttacgaatggtaaaaaggcaataactgatgtttactgagcacttcttatgtgctctaagctctcttcatgcrttctctttccccccttccaaatcctctccatcatagctgttaytgccacttaaagatgaaggaagagccttgagaggtttagtaacattcccaggctgagtggttaagtaactgggggaagctggaatttgatctctgcagccttttttgtctgtaaaatcttgggtgcactgtaagagaagcccaagaattgtccagcgaaattaaaactgcaccccaaagttcagcgcctgggctccatcctcagagccttttattgcacccgcgcttggatgggtgtcttgaagccgatttaatcctggtctgtctacacaggggagcagcaagctgttgacagccwcattttatggtcatcagtgccctcttccttctgaagcttgtcaattttaatgtctggagaaccagggggtggtgtaggggcttccagacccctgtttgcaatcaycacttgtacaccagagcttctcacacttagatgcatgtggaattccctggggttggagttaagttgcaggttgtgattccataggcctggcctggggtctgatcctgcatttgtaaccagctcccgggtgatgatgtggaggtgggtgtcctctggccacactgaagtccctagttctagatgccatcaccctcaccctacttcagaggctgtaccaaattcttagaagagaaattttgcctcaaaarcgacctgggaacctgacctcaggaagaatttcatctctgtgggaatgtggaatcggagtgatagaggtgaatgacaaggatgtggtgttccttaagctgactcctgatgagcttggcgaaatgaagccagacattttataattggtcccttttctttgtgtagtgtctaacactttttgaatacctactgcatgtcagtgccttttcccactgaggatcgtactggataactttggatctaaggtcgctttggcagtgagaagttcccgcctctgagtcaagaccacctttgagtccagaaatggtggctcacgcctgtaatcccagcactttaggaagctgaggtgggagcttggcccaggagctcaagaccagcctgggcaacatagtgagacccttacttgacaaaaaaataaaaaaattagccaggcgcagtggcacgtgcctgtagtccccgctacgtgggaggctgaggcgggaggattgcttgagcccaggagttcaagactgcagtgagccatgattgtgccactgcacttcagcctgggtgagagagcgagaccctgtctcaaaaaaataaacataaaaataaagaccacctttgagttagcaagtatgacaggagcgcgtgagtaggaaggagggaagattcggatgatacacatgttatcatgctgtatttccttcactaattatatgggctcggtaagggatattcagaggttgtcagttgcctttgtgccagattcagttggactctgataaagacctaggcaaatacgatgtctgtgcaccgtgttctgggaagcactttgaaggaccccgggcagattcactggcatagttaatacaccccggactttccctcgccctgcatatggtggcttatgagaagaaagcgaagactagaaaatcatttgtgtgtcactttgcaggaaaaacacttcaggtaatgagacaggatttgagtgggaaggtgattataaccaacccttcattcattttctacaaaatagtcaacatgcagtcttccaagctgcataatgaatatagcatcctttagctggggatgttgggaggatttattttttatctgtgatccaatattaatttgccttaaacaaaagaagcaatttactstgtaattctgaggtttatggtgtttctactaagtcctttcatctttgaaagatggtgttatgcattttaatagaaaccatttttttcttaaaatcttttctttttctttttttttttttttaactctttcttctcttcagtcggattatagagttggagcaaatgtcatgatgaactttgaggcctaggcctggactcttaaggtgtgtgtgtgtgtgtgtgtgtgtgtgtgtgtgtttctttctccataatagtcccaaccctaaacaggggtatggcacagtacttcttatgaacaaaagtgctattggtctacaaggggacttgagcctgcactaattgtatttgattaggatttttgtgctgtctgtatgatgtttaaccacactgtcaattacagacttcctttaaggaatttccaggaaacccccttaccataagagtttaaattaatagtttgctagtttaatgacagcagttggtaaaggaagcacctttcagaccattagctaaagccaacttcctttaaacttaaaggagggcacagcatgatagatggagatctgccccagtgygtcatcataaatgcctcgaggcagccacaggatgggttttgacctcagtggggataggtttggttagagggttgggtagaaccccctaacctgtagaagaatctagaaaagtgagatgaacgcctttctcttaaggctgtcacttgtccaattccaactccctctttagtaaccacctccctgcctcccagcgaagtgaccccagggagccggttattatggccctgcttgatggataattactggttgaggcttgatttgacaccagcattttgcatgatagcctgttagatttgcttggctcagattgatattttcattcctctaaggctgcagcatggaaacatggttgagtggkgtttgccaagatgggatgatttcctgtgctgtggcaggaccaggacagctgttctgagaactgtttcggcaaagccttcacagttggttttgttgaaggcttttctgcaggtgcagggttggttcctaaaggacagtagtctggttttcctaggaaactacttatggagagtgcgtgtgtttaatttaggaggcacagctgtgcaagggactgggactccatcagggaacggggtgcaggagctccatgttccttatgtcttagcttcattcctagttgctggcgtcggaactgatcaaagttgtctgttgtctttctgcacacccatgctacaggcagtaagggatgaggcagcaaaaccagttcactgctcatcagctggggaggcttcaggacagtctctgaactactgagcattagtttctttatctgtccaatgggcccaatggcacctgctctgctcatctctcaggatcttacatgccacataagctaatggagaagtaaatgctttataagcctaaaggaatggacatgggtgcattcagtgagaggcagtaggactaatggttagtgattagtttgctaagtaggagcagcagttgttagtgtaagaagggcgggttagtacatgggtggtggtcaggaggagcaccactgctgctgctacttagccacttgtgtaacctttttttttaaacaaaacaaaacaaaaaaaaacaaacctctcagtctgctataggatagattgttccagcatctgaaattgcaaagcacttcttgaaggggattcttaggatggcgtaattttgttcactcataggatcttcttcctggggcatgatcctagccatgttcaggataagccctgagcatcaagctggtgcagtgaagtgttctgtggctggaggctaaatctgtcccaggctcacagcatgggagcggggatggcaggggcttttgaattcccttgagggcacttggcctttgcttgtatctgctcaggaagtcagacagtctgcagccagtggcgtgtgcagccaccccttctgttctctgaccctggaggcttgtggtccatttgttttaaaggtgactgtctgatattcctttggaatacgtgagtccggtgggaaagaatagaacatattctgaatcttaatggtggatttaaaaaatctatttagagaatctgagcacttaattagacatgtctttttttccccagctgccctaattaaatagtaatcataataaggataaggataatagttgatctcagtatcctgtctcccagtgaagttgctcaatacatatttgtagatgaatgacttggagatccaaaggaaggttcagagatttgccattgtattcgagtctaccctggtgggacctttaaggtgaacattcttcttctctgggcctccaccttttcccttcccatataactattttctccttatctgcatgcttttctgcaatgcatatccgcaacaggtgagcctgggtgaatatgattacatgcaggttggtttttctcccttctttgtggtccgcgttttgggattaaatccccctgcagacttttgtctggtcagcctggttgtgactgtggatcttggttwcgtatactgtcagagatggcaaggaattcaaagatgatgtcgttttacgtctttattttataaactcgggcccaaagtgaaatgacttgcccaagaatacactgagtgagtgaggtggtcatagagagctagctctcctgacgcttagctcagacctaattccaggaaggtgactgcatctagcttctgccccaacacatcctgggaagaaatggtatcctgctaagagaatgagggctggatggaggtgtcctgcgtaacggtgtcaaagtacttcactctgtcctctggggatcccacagtgattctttgattctatgcccactgaggaaaagttgatttgagtctactccactgtttgattgaaatgggcctcttctgtccccagcctggtgagtcgtatcttgtttccctgccagtgggcattttctgcctttatccccgctcatggctgctgaatgggtcacccaggctggggcaggctgaactacaggctaatgaaattgtttggcctagttcctgcttggtggtgaaatctcagacaggatcttatcaccctctctgtgcccggaaaattcgactctcctggagcttataaaattgggatgtctgtttccactagcatttctttcccagttatattaatcaataatgtgaaattaaatcaagaaattcyttatgccggcactggcttctccaatacatttatctctgtattctagtatttgctttggctctttttctcagaaggggatttttccacacaatttaggagcacagagcgaacttcctgggaaagcctagaaattcaaacatccttagctgcataaacttgggagtatcagtatatctcactgagccgtgttatttttaatctgtaaaatgggcatcagtgtgccacccttgcagatgttgtaaggattacatgagattgtatggtgtgtaggatacacctcacttcgtgtttggcatttagtgggtcttcatgtggaggtccgagctttcaagacagccttttgyctgatgtagatgtatttacgtgtattggtgtagggttctcaggcaggcttgatcatcagaattacctggtgtactttaaaataatcccagcatgagcatcagataccagggttcccccagaccactcactcatccgaatctctggagatgggccctatgttccatcattttattttatttttctattttttttcaatatttttgtagacgtggcgggtggagggctggtcttgctatgttgcttgggctggtcttgaactcctggcctcaggcaatcctcctgcctcagcctcctaaagtgctggaattactggtgtgaatcactgcgcctggtcctatcgcatcattctgaaaggctccccctgtgctattttgaatcctcagccacatttggggacctctgtaggatgggttttattttttctcatcatccttgataaaggcaaaatggtggtatggtatagagacttgaggatttcaatctgatcattttttcatgcttgatttgggctctgttcacagcaagtttgttgggataggtggggtaggaaagggggacaatttaaaaataatcgtctaataagagaagctgtgatgcttgactaattagaaatggagaatttgcttcttaaaaaggcaatcttcatagtactaaagacaaccagattatatctgttcaggccaccatagggtttgccttcagatgcagaaacttatctctgagatggctttaagatggagtggtgagagtccacattgagtttcctatctgtttccagatgtgtgsgtggggtttcttgtctctgtctctgtcccycctcctctggctggcttaatactgggagaattcttttcgcttcctggaggacccacatgctttggagtgagggaagccaacttgaattctggctccaatccttaaatcccatctggaagtgtcatatagatgggatctgttcccagcttggaatctacctgggtataacctggcactcaacgtgtggcctcagatgtttttgttgagcaaagagaaatatatcagagaaagatgaaaaaaaccccaaatcaggaaatctgtccatttccacttcctgattctgtgaccttcagcaagtcattgaacyttagagagtgagccttggttcccttatttgtgaaatggagtgctcacattcctttccttagctttctcaagtgaaataatattttatgtaaaaatgcttttgtaaaaccgcagagcagcctcacccttactgtaaaaggaatattttgttgcttgttagaacactggcatttactcagcatttttgctggttgtttacctgttatctctctctgtgttaaacatggaaaattatttgtttataagttttctttctgctttttagtcttctgggaaccctgcagtgcctaggcactttgaggaagggttttctggaatttcacatgggtttcacctcaccctatccacatagcttgtctttagaagtccctatctccctgtgttttctggggtgaaagacagaagctctgatctgcaacctcaaagctgcagtgttcaggaaagccagatatttttgttttctttctttctttttttttttttttttgcctctcaattggagtcatatagtgctgcagcaagacttgttttctggattagttactgacccaaagtatttttcttgcgaataaatgttgcttcccaccacagtgactcgagaataggaaggacacatggagaggattataaataggttttggtgccaacagatagggcagccttccagaaaaattatttgcattcaccatgtgtttgttaaatgggcaattatggagtgtacagttgctagcatttgtttgcctctccttgggaaggcgatagttcagtagtggcctgcatttgacccttagtcagagagctagtgggctttgcagctagttcattcatttgtcctaatccaggatggactgtttaaaaatatatatccagccagaaaacagacatagacasgtatagggaatgagttcttgacagagaatttcagtatttaaccattggtataagcatccttccatccatccattcatctacttatccaccttaccatccattttccatccctccttccattcatccatccactcacctactcttctacccatccactcatccatccgtccgtccatccattcatccacccatccatccatccatccatccacccatccatccatccatcctccattttggcaaatggttatcaagcacctactgggtgccagttctgtcctgggttttggggatgaaaagtcaaataagacaggatctctgacctcaaggagcctacagtctgcggtacaggatgttttcctaaattttaagtcaaattctyccttgacacatacctatttttattttgttttggttctcatctctgtgaacagagcaaagcatgcaaccattgtaacactttcatttgtttttataaactcaagttctagagttggatttcatgatttgcataactcggcatagtgtaagtgcttgtagttttaaacagaaaaagagggaagaaatgacaatccagaaaaaagatcaaatcttatgactgtaatttattaaggtatccaatggaattctttccttttttctttcttttttttttttttttaagagacagtctcagttacatargctggaatgcagtatcatgatcatagttcacagcagccttcaactcctgggttcaagtgatcctagaacttgtggcctcaagcagtcctcctgcctcagcctgccaaagtgctgggattacaagcatgagccactgctcctaattcttaagagatatttttaaacctcatagtgtatactcttcagaattactttttgaaccataagtttaaatggcaaacactttctaaatgtattttactgaaaggccagttgagaagaagaggattccatcatcttttgaattagcatgaggacaggccattaaaattcatgattaagagcacaggatttaggtctgacaaacctgggtttggatttccattttgctgttctctacctgtgtgacttggggcaaattacttaatctccctgagcctcagctttcctctttataaaatgggaataacaacagtatttacctgagagaactggtattagaatgaagcgagagtaaagatttgcaaagtactcaacacaggcctgggatatagtaagtgctattttgattatttttaagggcaaagagattagatagttaacaaaaaaaggaaaaccaaatattggtcattggagggtttctgtggaaataagatatgtgatgccttttggtattacacaactaacaatctcctgagaaatcgtaaggtttctcayatagcccttatttgcatctttgctatgatgccgatttttaccaagctgttttttgcagttcaaggattggtgggaaacgtttgtatgtgttggggtgggggtgggagaagaaagagcgtcaagcctataaacaatgcttcagattttcagctaattttaacacgaattagattttaggtttttagcatgtcttttcggcagacgaccccacttagaaaatccaattctgaaattaatttcaacaaatcagaaaggctgattggtagttgtatctgactttttttcttgttgaccagtgagttgacttttatataacacttgaggcaaagagttcagtgttgtgggaattattttcacaaatggatcattttcttaaaaaaaaaaagaaaagaaaagaaaaagaaaagaagggagaatttctcttggtgtttttgttccatggaaggtagttctacatactgtttatagaggccttgatcctttttaaacttaaggagcccagttggcctctattgcaataaattgagctccatataggggctgagggacatttaatttatgtgcctgactcttttccccagttcagccggctacttcctgggatggtgttcttgattgatggcccttctggcatgttgtgctgctgggatgtcttttgaagtttctcctccgggcctgaggtttgcccctgtgaggtgttaatgggcttcctgctggggctttatttgtgaggggtgcttgttagagggggcttgatgggccagtgggggcaccagagcgccagttcttccactctgaagagttgattctcaggccctggactcgtgttctcaacccactgcaagtcttgtttttatttgtgctcctcaggtagaaatgtttagcttctgggggttccgagaaccctggcaggttttgggagtgggtgatcaggcccagccagggaagggttgctttgagaacccacacagataagtggactcctccccacaggggatggcagggatttgcggtgaataataaggggttgagtcttgagcaagatggcccataccttgtcctcttttctcccgggttggcaaggcctccgtgttctcctccctgggtcctcagcggcctgactgcctctagcctcccctcccaaattccattctcctcagcaccacacggcactctttctaaaatggctctcctcttgccagtcctttcatggtgtaacgggttgaattgtgtctccccacaaattcctaacccccaatgcctcagaatgtgactgtattcagagataaatagggcctttaaaaaggtgattaaggtaaaatggggtcattagggtggatactaatccagtctgactgatgggcacagaaaccagacctgacctgccaacaccttatcttccagcctccagaactgtgagaaaataactttgttgtttaggccacccagtctgtggtactttattttggcagcctgagtggattaatacacatggctaccttgaccgatggggtatatttccaacctcatggagtgtcacaggaggtcttttgtctctggctgctgtctgcctttctgaccttgggcagagctctcttctcttgcctgagaaactacagatcctttatgactcagttctaggctacctgctctgcgtgaggccctctgagaccatccttctctctgtctccctcccctccccaccgacgtggatcttctatacwcttctgagaaccttgagggcagagacagcacctagctctgagcctggtagttaatcagtgtttattgaattagttaagacttacactttattgttttgtttccttaggaagctacccgctatgcccaacttagtgctctattagaaaagatgatgtattagtctgtttccacactgctgtaaagaactacctcagactgtgtaatttataaagaaaagaggtttaattgattcacagttcygcatggctgggagagctcaggaaacttacaatcatggcggaaggtgaaagggaagcaaggcacgtcttacatggcagcargagagagagtaagggaggaagtaccacactttacaaccatcagatctcatgagaattcactcagtatcacgagaacagtatgggggaaaccacccccatgatccagtcacctcccaccaggttcctcccttgacacgtggggactacaagtggagatgagatttgggtggggacacagagccaaaccatatcagatgataaaccttgatttttcacagggtgttaatagcttcatacaggtatgtcccagatgatgatggttatgtccgtgataacactagtaattttagctagtatttactgagcacgttctatacaccaaacaagcatgtgcctcacctaactgtcacaacatcctttcaggtaagcrtattttcaagtaaatttgagccagctttatctgggagatggcatagcccagctgtgagcaagaagattcaaaagctaaaggcttctttgcctccagaycatttctggcagggcttgacactccaaagtgatttttcttcaggtgctcaatcwcatagtaaatttcaatgaaactggcgagcaaatgaaacctcctttaactcactcttcatttgcaaacgtaggaagaaattgttcagtgacaactctgttcagtagaaccatcatgagttcactgggtccccctgcagcttggggactgggtggccagtgctgttcttccacctgccactctttagatatggaaaaagagacctggaggagttttccaagatgttgtcaggttataagaagagctagtgagtgcactagactgtgctgtttttcctttggtgttcagatagagagaattttaaattcactttttgctctaggtgctatcaaggcttttagttatttttcattttaaaaccctgggaaagaagagggatgacctggccattttcgatccaatgtacttgacagtatttccttgtgctgcagtgtccccaggactgactttgcaattctttctgagttgtgccataccactgaatccactgagggcaaccttaccttttggaagggaggtgagaagaataaagaaatgtagaaattcagtaaacacaccgctgggcaagtaggacctcagtctagtgtagagagagctggctgccatcaggaaatagctgtgtccacagctttctcattttaccttagtgctcaggcagaccctgtggaggaaatgaaatttaaatagagaggtggacaagtctctgcctgagcttccctgaggctggggaaggagatgagggcaaattgagcacctggagaccagagtaactaaggagttgtgcctacttactctttgctggagagattgttaggtctggcatacatttctgggggttattagattccttccttggtttaggtcaacttgttgtgtgacagggagacattgtattctaatctctggaatctggctgcctttttccatccctggccctgccacttactttgagagctcagacaagtggcttgactctctttgttcttttatagggctgtgtgtggattaaataagatcatgcatgtaaagtatgtagcccagtacttgttttatcaattcagctgctttgacagagaggccccaaataatgatgactttaaaaagatgtaaattgatttctccgtgatacatggtcagggtagacggcctaggactggttctgcaggttccacaatgatcagagacccagccttctatagcttgttgttttgccatcttcaatgtatgcctttcatctcctggtccaaggtggctgcttcagttcctgccatcatttctgcattccagccagtaagggaaaaggggatatggaaggcatggctctttcccttaacaacatgaccgaaaagttactcacaacactgtctcatctcactggccaaagctcaatcatgtgatcacattattcacaagtgaggcagggaaattgtagtctttagctggatgcccaactaaaaagcatgattacaggctgggtgcggtggctcatgcctgtaatcccaacactttgggaggctgaggtgggcggatcacttgaagacaggagttcaagaccagcctggccaacatagtgaaacctcatctctactaaaaatacaaaaaattagcyaggcatggtggcacaagcctgtaatcccagccaattgggaggctgaggcacaagaatctcttgaamccgggaggtggaggttgctgtgagccgagattgcgccattatagttgagcctgggagacagagtgagactctgtctcaaagcactattactgtataagaaagagaggtgggatactggggacaacttgcagtatctatccaagagttaaatgctcaataaatgttagttrtcactaccaccaccaccaccatcattataatcatcatgatcatcatcatttctggtcttagcctataaattcctccacgtcctcacttcttatttgatccccttattctccattttagcccatgttagcttgtgctttgttctmttgcatgatttgcctctgtccctgtcttgagacctttttatacccagaggctggcaatgtaactagagtcctacaataagctcctgtgtgatgraaatggatcttaaagctggtgaggacattgacagtttagggagactagagcataaagtcttagcaatctacttggcagcttcattgacatactacaggaaaaggtgacggaaggaagaaaaaagtctagctatcttgaaatgtaggttaagcacttgcttcattttgttgtattctttccactcacttttgtgaacttccactgaagatgtcttgaatctccatggaattcttctcaaagcttcagcctggatatccagcctcctgactcacctttggggtttccaaaatatgataagttcaaaatctgtggccttaagaaggtggtggaagccaagtttcttttggttcagaagcactttgagtatataaatggattcgtgctgtagaccctgattcatgatttagatgtttcgcaggagcttttcaggatagagatggttcattgaaatttcacgtggatttaaggctcattaaggtgttggggaagccggatgccactctgtcagtataaatyccagtgaggctaatttagtggagctgtagccagctttcatgttttccatcagccacacttaccttcatctcttcccttctcctttctaaaatactgtatcagaaagtgacattttttttctcctaggagaagaatcgctcaaagatgatggtcttccttctttctaccatggtatttgtctttaaagattaggcgatgtggtgggtgggcatggtggctcatgcctgtaatcccaacactttgggaggctgaggtgagagggtcagtgaggccaggagtttgagaccagcctgggcaacatagtgggaccttgcctttacaaaaaatgtaaaaaattagccaggtgttgtggtccatgccggtactcccaggtacttgagaggcaagaggatcgcttgagcccaggaggttgaggctgcagtgagctatgattgtggcaacagagggagatcctgtgtccaaaaaaaaaaaaaaagagagagagagagagaaagattaagtgacatggatacaaaggatgggaaaatcctgcaaagaaagattgaagtcattgttgatttattttttctttccctcattctttcttcttttcagtccctgtgggttctccctgagatctctcttgggaattcctctcattcatttcttcccttgtgttactgttctaattcaggcccatagtatcccttgctaggactggtgcagtagtcttctggtttccttgcctcctgcctcttctccatcctgtgcatgttctcccagcactgatctggcccagtcactctctctgttacacatagtaccttcttcccattactgtcaatggcatacacccttccttggcatgggatccaagaccagaccatgactatggttgtttgctaacagtcagaatatctggcatcatggtaggcattgtttgtaaatcttttttacagtgaaggaaatggaggctagagggattaagtcacttgcccagtggctcctgctaaaaagcaatgaaaccaggattgggctctgggcagctgcactccaaaactggtgctcttaatccccacatcatgtgttggtctcatctctgtctatcctcttctcccaccrtctctttccctcacaccctggcttccagccccacgaatcggctttcatgtccctgtcttgttgccatcaacagcatgacttgaagttgcccatgtcatggtgtctgaaccttcatgtttgctgtcctctctgcctggagtgccttccctctcccttttgactggcaaagtttcactccaaggtctagttcacagcccttttgtgatgattcccacccccaccccgttataaraatgagccaaagacggtgtattggttcctaggttgtttcttcacaacagactgcacctaacagtctcaaaaacctgtaggttccaaactcaatttttaaaatrtttatgagtttattacaaagaataccaaggaacagtccgatgcagaggtacatagggcaaggtgcgggaggggtgyagagcgtccatgccctctccaggcatgccatcctcccaccacctgtgtgttcaccagctcagaagctctctacaccccttcccaacctcaaatttttacacatccatttgttttaaaaatagccaaaacaagcagatttctagccattcagggcctgcctactttgcataccccacagaactatacccaccgtgtgccagccaytgatgagacagagccttatggttataagacctaagactgctcactgtcccaatgatcctacaatgctcctgagctacatcatcccctacagttcccctccccaccccagacagtgkyccccacacccaccataaccctctggatggtctcatgctatgagggacttccctctcatgcaaccctgtttaagtgctgttgtgtgtcactgccaaatcttttttctttttatttccttttagagataggttctcgctatgttgcccaggctggtcttgaactcctgggctcaagcaaacctcctgcctcagcctcctgagtagctggggctacaggcacgcaccaccatgtcttgcttccaaatctcttttcttgatgagctcccaattactcaaacccctataccctcaacagattccatcactctgttttataaatttccatggtattttgaacccacctccatgactgtactcatcacatcatgctatagttagttgtatacttgattatcatccctttggattcctgaccaagacttgaggaagccagggagccctgggttggaaagaataggaagaagtgtaatgaactcgtaaacatgatcaggtgttcccagcgtcatggattcctttgtggttttgtacttggccatgctttatcttggttgctggcatcaaacctgaaaacactggcattttgtgaagcacctggggaagaacttataagtttaatttcctctgagcctgaaaatatgaccaggtgaaatgtatgaagtagggatgattactaaaatggagacttttcaaggcttattttgatggttcttttgtttcctgccatctccccttaacctggacttgacaactaaaaaaatgaataaataaatcaataaataaatgagtggaaggattctccgcgtgataatgattcttctgagcacattttcttccaaactgtgctcccagaagacacttggagtcttagatggttcatggatcattatcacttgtcrgggacagtggaaacgtaggagctggttgcaagtgccaatcaataagcaatgaaaagaaggcactgtgaaatggcctcagccaatggatgttcagagagacagagacaggcagcttttctggataagtctttttggctgtagctcatgtcccgttacaaaaatttccrttggattgggccgaggctgggaaattgaaggcatttatttagaatgaaactaaaatttacccccatccccaaatcctttcaatgaaattaaagttacttataatgaaagagagatcttgggttagtagagatgcattttttaatagagaaagggaaaactaaaatgtggttttcttaagcctttggcaaggttcatgttgaaataacagttctttttttccttcaacattgtcagtgtaatagtgatataaagttttatgaataaataaatgtatttagcaaaatgacatatttcagcgataaatttggtttcttagttcagaatattgctttgactaaggaaggagagtgacagaatgaatatcaaggactctacccctcatttccattttctttgacagtgtgatatgggccacaaatgaagaccttgamcctgaaaccgtctgtggtttctctagcaattctcacsacttagcctcttcctccttcttccctcagaaccgggcaaatagagcaaggacaatttcccagcaatatttttccaagttgcggttagtcacttgctgctcacggttcccatttagtgatttcsatttcaatgaactttttgcttagtgacttttgaattcgttcttatcacattacaaacacatacctgaaggttgccaggtggatggatttcagttgatcccactgagagggcaggagaggccactgtcctctttaatgtttcctcccaggaaggaaggattcatcatgtaatcctgtatcggtgctgcatggtttctggtgtgagtggtgcctggccttgaagctctgctaatctccagacggccagactgaagagcataatgcatgtgtrggctgatttcttgggagcttttgttttgattattttcatttgcatactgatttattaagcaccagaatgtaagggctagaaatctttttatttcatcttattaagaagctcaattattctttcttcgcagaagccaagtttctgattagctataccaaccccatctccattaggcaatttaagatgtgaattatacattttttaaaaagyagctaattatggtaaagcctgacacatttatatttctgtgaaacccctgtggcaaagattctggctagaagatgacatcatatggggttataaaatcactccttgtggagctgtttcttcatgttgtaagaaaacttgtaaatctgaaaagattgtacttatgccttctgatcctccttccctaggcctcacctgccctttggagtctgtgagctgagttatggtgtagggactccgtccttgatattctcatagagatgccctcgtcctcctggatttcagggtggaaggaatgggaatggtaggtcaagtctgagacattgaggtctgacgctgtcttcctgttcagatggtagcttgttttggggacctttcagcggagtgtctgtccttagtgcctcatgggctgccatgcactgggttttaastgcaaactgttttagaataatctggtcttaatgtctgggagttctaatatgtgcatcccaatgaggttcttagacctcagggccagatctcacactgactctctttgaccrtgctgcattccacaggcaatgtggaatgttgcttacctcaaggaacataaaccttacattgtggaatagaggtatttgcaaatatcttctcctctcccattgccagggtggctcagtgtctgctaaaattgaatccatatgggtacaccgagcagaaggggagggcggaatgggtgggaaagtacattgcagtatttgtttgtgatgacattcatttaaccagagctaacctcggagttataaaccagggcattatttcctaaacagtatcatgtattcatttgtggcagtatagaagatttaatttatacatgtatttatgcatagacatatgaaagagatcatarctctggattcaatgtgataaaaagcagattcattctagagtcccatatacagtggattgtgaagaacaatcctttttattatataacatttactttcctctaggacatctgttagttcagctgttttcaatggtgcatcagcaacatacagaggggatatgcattagaaatgagggtgagactgtaatttgataaaacatatcaattcactttgctggttttttccatacaaaaatacagacagcaaagcaggacaagtcttcttgcctggcagggacgtgaaaatgatggactgggaaagtatcttcgggatgagggctcgtaaaggctgagaaatgatgccttggagctcatgagaaatagtatttgctcaaaccctttcaagacaaactatgaccacttaatttactttaagtctggtgtttatgtcatagactcagtatttaagtctaatgaggccaacctcttcttcatatagaactgcccatgagtcgatgcccatcattgcttggtaaagacttcctactcaatgtgtggtcataggaccagcagtatcagcaccacagttgttagatgttagcagtgcagaatctcaggcctcacttgtccatatgatgtacttgtgtaaattttgcaygcctttgcttcattgttcttccacgtcatccacagcagcccatggtagcatgtctcattctcttcctttgatcgggaggagtctggatttttggatcggatcagaactgtgctcagcttggctctgcctgtcttttcattgctctgccttgcttttctcttctataaagtggagataccaacagcaacctcacagggcttttaagagaatgtttataaaacacttggcacagagcgaggcagatagaagatggtggtkattactgtgatgacagtgatgtttatgtcccatctcccctggtggttgtatgttcctttgaaagagcctccctgtccarttcatctttctattcctccaggccggcttctctgtgcctggaacatgtttgatggctgaagggatagttgtgcagcactaccatctgtaccttaagatccttgatctctgaaaaattcagtttgagtcagaggcagcagtcctaataactttagctcccaggggaagcattctagaagctgttaggaaacaatttcttcactgtcaggttcaggcatgtgcatggctgccctctggttacacaccacattgcacgcaggtgtgtggaacaaaaaggggtagttgctgaaaatataccagctcaaggtttccattatcatgtcactctggaatgagatggaaagtgaagagctcaaataacaggcttcaatcatccaccaacttggggagttgtcatcttggattgggattatggttctaagatacagaagacctaaaacagcagaacctaagatggtgggctggtgctatccatagaaacagctgaccaggcaggtgcccagcattgaattagcattgaccttgagatacccagcatgtggctttccacgacattaggggggtagtggggccaagcagttaacagggtgggctctgaggtccaatgacttgggttggaatcttggccctgcttcttatcagtggaatcacaggcaagttacttaacttcaccaacccacaccactcacaagaacattagaacactggagatggatttatgccctgactggttaagttcaatagaatttttaaaaacccttttaatgtatttttaatttggaataggtttaaaattcgagaaaagttgtgaaaataatacagataatatagttttcatctgctcctcccagtacctccctgctttttttttttttttttttggagacagggtctcaactctgttccctaggctggagtgcagtgatgccatcatggctcactacagcctcaaattcccgggctctggtgatcctcacacctcagcctcctgaatgaccgggaccacaggtgcgtaccaccatgcccggctaactttttacttcttggtagagatgaggtcttgctctgttgcctaggctgcttttgaactcgtgagctcaagcgatcctcccacctcagcctcccacagtgccgggattccaggcattagccacccagtgttgttaacatcttacattagtatggtacatttgtcatgactaatgaacggatattgatacattattattaactgatgaccatattttactcagattttcttagttgttacctaatgttcttttcttattccagaattccatgcaagagatcacattatgtttagttgtcatgtcttcataggcatgtggctgtggcagtttctcagacattccttatttcggtgatcttgcccattttgaggcatgttggtcaagtgttttgtaggacattcctcaattgggatttttctcatgtttttctcatgaattgactgaggtttgggaatttcaggagaaagatcagagaggtaaggatctgttctcatctcatcctatcaagggtgcatcaccctctcaacatgagttatcactgttgatgttgaccttcgtctcttggctaagtagtgttcgttgagtttttccgaggtaaaattgctctttcccactcttcccctactgtattctttgggagagagtcattatacgcagcctaaagttatggagaatgttaaagagaatatatattttttgaactttgcccatccataccttttttcaacattttctgtagcccacatcctattaaaatccacttcatttctttcctccaccagattgtaacctccttcatggaaaaagccaaggcttatttgtgtaaacaatataggttaattggccaaattacttgacatttcagatcagttcccccaattgccagtgcatrttctaattcagcattataacatctggcagtgagaaacagaaatttactatctttattttgagaagtgttgatttttgagtaattgaggcctagaagttccaagcagtaataacaatgaaagctcacacttacatagcacttcttgtatttcagacacggtgtctgcattcaacatatgccaactcattgaatccacacgacaatcctataaagcagtcacacttattatcctcattttacagatgaagacactgaggccaagagagttgtcgtgcccagagaagtgttgcccaaggttacacagctggcaaattgcagagctgggcaataggattttgaaagcaaaaagttatctatatatctgctaaccgttcttccctctacccacaagcagcttgataacgcgactcttcacttttttcctgtgatagcacagagtccagactttggagcaccacagccatattgtttattcctggttccagcacttgcctgctgtgtgaccttgggcaggttacttcacttctctgtctctgcatctgaaaaatggggataataataatattggtacctccctggaggctttaataagataatgcaccacacctagtagttagygtttgtttttgttattttttagcatttattacaaatacaactgctgtatttcctgaattaaaagtatggggacatggatgaaaaattgcaagtgtctgtatggggatacgatgaaatatttaaaatagggattgtttcctgaaagtgggatggctgaacagtgggattataacatgcttgtaagaaagatggaggagctaaattgtagaagggactgagaaagccaggacacgttaggacccttggcactgaggagggatgcagctcacacccccaaaattgtcagccacaatggcataattcatagtaaagcatacactgaaagactttggttatcttttcagacttttaatagttatctaaatacagtcgtcctttggtatccttgggggattggttccagaacctcctatggatgctaaaatctacaatgctcaagtcccttatataaaataatgtagtagtatttgttttttcttttctttagagatagggtctcactgtgttgcccaggctggtctcgaactcgtgagctcaagcagtcctcccacctcagcctcccaaagtgctgggattacaagtgtgagccaccacacccagccctaaaaaggtgtcttagtatttatttgcatataacctatgtgcctyctcccatatactttactctctagattacttaaaatacttaatacagtgcctatacatcacttcgtttgtgtgactcagtgtagcactggttgtgcagcaaattcaagttttgctttttggaactttatggaatttttttctgaatattttccatctgaggttggttgaacccatgagtgtggaacccatgaatgtggaactcatgaatatggaggctgattgtacaggacaaaaagtcataaataaaatgaatgaataaagcctactttaaaattgatrtatatttaaaatttttaaaattgtaatttgggagccataaaaaagaatacaggtagtgtctcagatttaggaaaagtcattatttttagctaagaaccatcaattctagacttgttaatcttatcttcactttaatcaatagctctggcaggccactttttggggagagccatattttttgtaaaggaagactgaaagtcagaaagagtgtgtatgtgtgcaagagacaggaacctcgagctattgggccacaagggcacatccccagtgacctgaggcccctctcctgtactcctccaccctcacctgggtgatcttgtcttagattggtgcctcagcagaatcagaacgattgattacatgtcaaggaccaccagggaaacctgcagatgggtgaaaccgcagggttcagtctgggaaagccacggctccaatctctctaattacaaaattaatgagggctggaggcaaagcctccagacggcccagggtgagccagggagcattttgatgccctaaaacagctcatgtttatttcgtggtcttacctgatcgtgtgtggattgaagtgaaggggtgaggtagaaatggagcttcccctctaagattttgcttcttgagttaaggttggggtcaggtcagaaaatgctttttcatcgctagtgttttgatagcaaaagcaaagagccagtggcagaacttttcaaatgactcttagaggagatgacccagcgtccctgaggtatccaacacactagcttgtaagaataaggatcagaacatgactcgtatgtttgtattctgcagaatctctcyctctctctcacacacacacacacacacacacacacacacattttaaaagctttcatgtgccctgatcacgctgtgcttcttttgtgattaattgagagtctttggctttgctctggagatgcaaaaatccttgaggtgacctccacagagtgatgtaaacctacaaagtgattcatctcgtgtcagtgaagttgacatcttaaatgacagtctggcttgacatcccttttgggggtatttcttctcagagcctgcaagacccttttcatgaaacgtggtctgtgttcggtttgtatagtcatctcggtgcagctttttcttttcactataacaaaataacgatggtgttttctttttaattcctttagcttccttgcctgagtatttaggaagcaagtactcttaacattttttaaatgtctgtggtgggctagtggatattctgaaatagagttttggcatcacctctttctttcaaatccccctgttgrgcataggatatttactttgaatgaatttgtctgaattttagagactctcttgctttgctccatctcatgsggaaattgggaaaacaaatgagaaaaagggcagtgcaaataacttcaggtcagctaatctggaggggaaagaagtgtcttaggagtaaagatggttattagttaggcacggaggcaggtgcctgtaatcccagatactcgggaggctgagacagggaaaattgcttgaacccrggaggcggaggttgcagtgagctgagattgcgccactgcactccagcctgagagacagagcgagactccgtctcagaaagactgtcagctaccagttgctataccagaggtaataactgaatgataatacccctgcattttactttctagcaactttcatgtccactatttcatttttaacatcttggatgtgtaggaccaasttatgataagcaactaacttcatctttcctcaattgagaagagtgaggcatgcttctaaatgtagtgttgaacattgtggaggatatgctaacattttagaaataatccaatttagccactgtgggaaatggtatggcagttcccccaaaaattaaacgtagaattatcatgtggtccagaattctacttcttggatatatacccaaaagaactgaaagcagggacttgaatggatatttgtacagctatgttcatagcggcattattcacaatagccaaaaggtgaaaacaactcacgtgtccatcgagggatgaatggataaaccaaatgtaatataaacatacamtggacarctattcattcaggcttaaaatgaaagaaaattttgacacatgctacaacatgggtgaaccttgaagacatgatactaagtgaaatcagccagacacagaaggacaaatactgtgtgatccaatttcataacaatgtaaaaagcacagggtattttgggagagacacacatgaaactggtatcagtgattatgcaaaatagtctaggacctggagccccagtgtccagcacatagtgtgtgttttagaaatactaatgagtagacagttgttgcctgggtagagtggggatagtggggaagacctatttttcactgtataaaccttttagtgccttttggttttcataccatgtggcttcgttacctcttcaaaacattaaccctttagatccagtggcagtgaaggtggtaaagggagatgtaagttcccatttaggacattttaggacccccaagggttgttaccctaaagagtagttgatgattaaattaaatctctgaaccatcctcatgccgaaggggtgttgacaggggacagtgrcaaccagtgtgttagtccatttgtgttgctataaagggatacctgaggctgggcaatttatagaggaaagaagtttgattggcttacagttctgcaggctgtacaagcatggcaccagcatctgctgagcttcaggtgaggcctcaggaagcttccagtcatggcagaaggtgaaggggagccggggtgtcacatggtgagagagtgagcaagagagagggggaggaggtgccagggtcttttaaacaaccagatcccatgtaaactcacagtgtgagaactcactcattaccaagaggatagcaccaagccattcttgaggtatcagcctccatgacrcaaacacctccccctaggcccacgcccaacattagacgtcacatttcaacatgagatttggaggggacaaaccatccaaactgtgtcaygcagtatttttccaggcttagtttttacattagcaggacaggcatttttggcaacatgtcatattttgtgtttccatttgctcctgataggggaggagactagtggtctcttctagctttttatgcttttaaactgttttgcagagaaatgtggtgttttcccccaaccccytcccatccttctcgtccctggactcggctcagagtcttacaggagtccaggagtataagttgagggaaattaatgcatttggttggatcctgcctgatgtactttatctatcagtggcatcatgagacctgacgacagtcactgaagtcactgtatactttttttcacctcttcctgcctcttcccttacccatctcccctgccccggtaactaacagattccttccagtcaaggagctgattattatatttttccctttacttttttggggcactgctaaagatgtatctgaagcagggcatggaggtatgcacctatagtcccagctactcgggaggccaaggcgggaggatcctaggaattcaagactagcctgggcaacatagcaagatccccatytatgcaaaaaattttaaaaaattagccgagcctggtggyatacacctgtagtcctggctactcgggaggctgaggcgggaggatggctggagcccaggagtttgaggctgcagtgagctatggttgaatcactgcactccagcctgggcaacagagagagaccctgtctgttaaaaaaaaaaaaaaagaaaaaaaaagaaagaaagaaagacctgaaaagaactaattaacgctcatacatasaatttttgatgagaaccttctggctctaaagaaagtattggtcaactatactgtctaggctaatttcttagaaaataatgagcatagttaaggataactgagaaaatgtaaactatggagactgtatcccatgtcaaaattaaaaaattggtggattgatagggagagaggaggataagggagaaaatgtattttgccattgtagaaatcagaaatttgggccgggcacggtggcttacacctgtaatcccagcactttggcggggggatcacctgaggccaggagttcgagaccagcctggccaacatggtgaaactgtgtctctactaaaaatacaaaaattagctgggtgtcatggcagacacctgtcattccagctactcaggaggctgatgcaggagaatcasttgaacctgggaggcggaggttgcagtgagctgagatcgtgccactgcactccagcctgggtgacagagggakacttggtctaaaaaaaaaaaaaaaaaraaatcagaaatttgagcagtcaatgatgtgccctgggggtcacagtccccccmccccggagataatggatttggtgctttctttttgatttttcaaaataatactaaagtcattttcgcttccctctgaattactgcagtaaatttatatagggtggatgttggccttgccacagcaattatgtcgtttcgaagtatgccattgttttgtcctgcagctgaaaaaygggtgggtttattaggtccacagggcagcgtccttgttctgagaagagggaggcatgcaggaatggccagcattcctttttgttgggcttgtccctgtggatggcaagaatcccctggagccaggcacaaatcctgtctgagcagccctattattaccctgcagagtaaaagggagacaaagacccaaggtgaatttcgttacaaattgaaaagcaaaaaaatcaatccattcattgccttcttaaattctctgtcatgttcctccacactcagaggtttaaggaccatcagggaatggcccgtttgagggtggggagggcagggcccagccccatgagctgcctcagggcttctgcagagctggccacatgttgggctttattgayatcaggtgttgtgacccatggacttgatcaatcatttcggccttcccttgtggagcctgtccaggagaatggatgtggactgtgttctgatggaggaaaataaattgttcttggtcaggtttttgaaaataacagtccttgtctctcaggtgggcacatgcttggctgattgatggaatatctagaagccttggcttaaatatagaacaaatgatattgagctacttaatcttactatcactgtaccaggttccataaagatgatgccttggtcagctcaggctgctgtaacaaacaaaggcacgtttcttataaacaatagaaacttgtttttcacagtctggaagctgaaactctgggatccaggtggcagctagttggttgttagtgaggctctcttytgggtttgcagatggctaacttctcaccatagcctcacatggttgaggatggctggagaactctctagggtctctctctctcttgytctctstctctctytttttaaaagcagcatctcactttgtcacccaggctagaatgcaatggtatgatctcagctcactgcaacctccaccttccgggctcaggtgatcctcccatctcagtctccgtgcccatcctctagggtctgttttataaaggcatcaatccyacttatgagggctctaccctcattacctaattacctcccacaggctccaccttctaataccagcacattggggatttcgacacacgcattcagtccataacagatgaggagccaacattgttgaatcataagtgatccatttttttttctttttatttctgattgatcaaggcttgcaaaagatttaactttcctgggttgggtagagtggctcatacctataatcccagcactttgggaggcttaggtaggaggatcacctgaggtcaggagtttgagaccagcctggtcaacataacaagaccccatctctacaaaaaaaaaaaattagccaagcatggtggtgcatgcctgtagtcccagctatgggaggctgaggcaggagaatcgcttgagcccaggagctcaaggttgcagtgagctrtgatcttgccattgcatcccaccttgggtgacagaccctgtctcaaaaaaaaaaaaaaaatttaaatttcccttttaagtttttcttagctagcataataagggatagtctgagcaactcagactgcctatttagaaagctctgggttttgcttcaatatggatggaaaagggrattgaaaaagttgacacagaagggcatgcagtctcagaaagggccattgcagcacctggcgatttttttttccaggatggagaaaagttttcttgtcaggctacttcctgataggttcctgcagctgctttgatctaacttcctcttttccccactggacaaaaccaaaacaaagcaaaacaagtccaraaacaaaagagaagtggggataggaccagccacgtgtgtacccttgggcggttggtacatgctcagggcatgagcccaaacttgctgtgacaagtatggtcccaggctgtgccttttagaacagtgtcctccaaagtactagtgaagtggtactgagatttccaaagactgtctttgcagtgcaggatttctgattctgacagaaaccaaggggagaactcactttttctatttaaaaaattatcagtaataaagcactcaggtcttcgaccactcttgcaaatactgttgtttttctctagctgagtctaggaaggaatacgagtttatagtgcagtgccagtaaggttggaattttctgtgataggggagtaattgagacaggtacaaatcgtaagatcttcccgaggactggatacaggagaaagaaatgcagccccagaaagggaggtgtgcagttgcaggcagatgggccaaggagatggtctgattgccaagtggattggagcccaagtcttcaggttttcaagtgggtaattagaacaggaaggagccaaacacaggcctgctggcgccaggagccgcaagattttccgttcaggttgtgtcgtctcagagctaagatgggtgcatgcgagtacttccccggccagttaacaaatgcgagcatccartaccgtgcccatgactgtgggtgcagggagcagagtgtaggcagatgagcaaatggggtttccatgcctgaggaacaagaagtcttaggctaagtggtgagtacctgcaaaaatgagagaatagcacaagacggcatagctgagtaatacattgcatggttttgcttccaagtgccagcatctccgagtagtgtatctgacaccagcacactctggtgtcagaatcttgggtttatattctggctactcaaactgtgtggycctgggcaaattctttaatcttttttgggtttcaatttccatagctataaaatgagaatagttgtagtatctatctcgtgaatttattatgagaattaaattattttctcygtggattwaaaaaaaggacttttgcccctgattcttgtttttgaatacagtcttgatccccagaagtgtggcagctctcttgtacacatgatgaagagtgtgaaggggaaaagttgatatgcaaacaatggtggatgagggggtgaagctgttgggatccttgatgactgtggggtggccaaagctgacctcccaccttcagactttctgaaatcaaccactgatggctgggccttctgttacttgtaaccaaacgtatcttaattgatgcaggcttgttgccagactgtaaactcattgagggcagagccatgtcttattcacctttgggctgtcaaggacagcctaacctaatgcacggtggcacacagtaggtggtgcttagtggtttatgataggaagatgtgtggttagaaagcagggaaggaggcaaggaggcagggagaagtgatgtgctggtaaacagttaacaattagatctctggggaaaaattctgatttgtagcatttgccaatttccagggtgtaaatattcctatcatggctgatttcacgctaccagtgtgatgtgagtgagctcagtgttgggaagagatggtcacagtcagttcttgtgagttggtacaatccagccgtagctcaccactagaaggacagggaaaaagaaagggagagagaaaagggaagaaaatttattattaaaattaatagtaatcatggtaacgacactaacaatgtttaaactttattgagagcttactctgttccaggttcttcyggtccctcctaatgatcttccctttgcatctcattgaccatagctgggttgcatgccctttcctagttgcaggagaggcaagaaaagtttggcaaaggaaagtggaagtgttatgtcttgcttgggccattcaggtgtcattccttagggcagggccccttgcctccctgaacgcaggcaggcaactgtcagccaaggaggaggactgtgggataagcaaccaagactatctgaaaagacaagacctttcaagtagaatggattatttttcagacaccaaagttgccttttcagcaaagtgaactaggctccttatcatcaaaattctaaaatttctcactgccttctttcatttctgtggataccactccaaatatcataaattgacctggtccttcatatagaatggttggttttctaaaccaaacagatcccaaccacggtgataaatgaggtggggagatgggaaatctatgcagcttgtcaaaatatgattgcggtaaagcgtccagaagtgaaaactggagcctcctgtgtgcagattcaccatgtttagtggggctgtgcagtcctgcatgggctggagtggggacagctgtggcagaaawgaggtggacagagtgaggtggtgggcatgtcaactgcaaagttccttcattayggatcgacatgctcctttacatatcctgctgggctagttgctcacagtggagagtctggagttattgcaattctgtggcaggcaaaatatatagaataaaagaaaatgccttaattgggaccattgttgggagaaagagggcaagaactgttctaagggatatttctgtagtcttagcatcctcttcttaatttttgcagattttatgtcctgttgtcagtttctttaaaaaacaaacaaacaaaagagattacaagtgatttatgggttccacctcctaagaggtccagtgtgggaaaacaaaggaagggaagaaatcgatgtaaggagattaataattctggtaggaggcaccacrtgatgcacaggcctaaacttcctattgaagctggttggaaggccgaggcaggaggattgcttgagcccaggagtttgagactgctctgagcaacatagagagagccccgccactcaaaaaataacaaaaattagtcaggtgtggtggtgcgtgcctgtagtcccagctactcgggaggctgaggtgggagaatctcttgagcctgggaggtggaggctgcagtgagctgtgatctcactattgcattccagcctgggcgacagagtgagacctcatctccaaaaaaaagatgactaatttggaagacatggaccctgttttgaaacgatractcacttcagctagaggagaagcctggtggcacccaggtgaaaagaggccactcattatttctcagctggctgtaaattgcaccgggagtcagaatcgatacctacctgacctcttygggctgttggtaaaactagaggcaccccttgtggcygtgccgagttgatgtccagaagaacactggttggaggcgaccgttctttttaggctttccagtctagagcttacgacccccagtgcaggagtagcttggttctttgttgtctgatagtgtttcctgggtcagctggcatttcccccatgtggtctgacctcctgtgttataaaggcaaaactactttaagttagagatcagcatctggatattcagtcatcagccaaatattttgatctttctctgagcagaatggaaaaygtcctgctttgaaaaccttgccttgttcctcgaaggcaggggttggcaaactttgtttttaaagagscaagcagtaaactttgggttttgcagaccatacagyctgtcacaacttttcagttgtgcagttgtagagtgaaagcatcyataggcaataagtacacaaatgagtgtggctgtcacccaataayactgtttacaaaaacaagcagtgggaaggatttggcccacatgcctttgtttgccaaccatgattctaaggggtcttggatggaatggaaacctctgtcttgcccatatgggtcctaatgcattttaaaagtcagtgtgctgtttggctaagagacacttcctcacctgaaatcacagtgaagagcaaaaagggacagcgaactccttcttattccactggtgctcaaggggtaaaagaggaagaagatgtcgttgggccactttatgtaagtatatatactagggtggtgcaggctttgaacttctcactcagtgatgtccacgtcttttgtgttagccggctggctaaagtttaactttcccctaggacttcactaaatcctcacgtctgtaattttttttttcctctttctaatagcctggataaagaggaaaataaggtgagtgctgatggtccgtacttgagacrcactacagcttatttcttagcacttttcaggctttgggctatttcaaaggcgacctactctgtcatgttgaagtgtgggttgggattcacttgcatatcctcccagactggggatggctctattaagaaaggaaagcagtttccaattttacaaatgtgacgatttccccagcagactttcgacaggaaaaattaataggcaactgcatgttgcctcaatctattttcacattaagacccagaaggaggtgtggggtcaagctgacacctcttagatcggcacaccagggtgagggcctccaaacgctgacagcatcattccaccaggtagtgtgcagggaagttggctggttttcaacgtatgtcccgtgactgcttgcttttgtaagcatgtgttggctatagatggttagaaaggtcagcttcaagtgacaaaagccctggctcaagttgctagaatcacccagtttcagtccctttgaggtcttgcaagaagaaatgagataatcgccctcctcctttccgacttgcgctgtgccagtgtaacttagaagggcatcctctctgtgaaaagactggatttacatattttgctaattacagctgtcagattcctcgaagtgatttaagggtggggaggcctaacaagtgtgaagagtatttttagccaagttgtgtgggtttgatagccatttggggactagtaattgaatctaaagcttcatgtgaggccgtacggaagtggtgcgaggtggaaggagaccgaggttgggcgacgtaggtgtggggcagctgtggggtgatttgatcctggtgcgggctggtggtctctttgcctgctgtgacagctgtcagtcagcctgctttatggggtgtgaaattgacaccttctctgctgtctgggtgctggaaggggtacagttggaactggaaacttgatctgcagagcattcatttgtttattcattcaacaagcattttttgagtaaattagagtttctgaaactttcttgtacatacaggatcaccaggctgtcttgttaacatgcggatcctgttagtagatctgggatgggttgagagtctgcctttctaacaggcttttgggtgatgtcgatgctgctggtccagggaccatacctctactcagaaggcctaacactgtatgccactttggtgtgacaagatgaaacactttgagcttcctcargatcttcctttcccatttgcccagatgttcttcctctggatcttttctgttttttgtattttttgttttttatttttctttgagacaggtcttactctgtcacccaggctgcagtgcagtggcatgatcacagctcactgtagccttgacctcctgggctcaagccatcctcccacctcagcctcctgagtagctgggactacaggcgcacaccaccacacctggctaatttttcatttttttgtagagatgaggtctcactatattgcccaggctggtctcaaactcctgggctcaagtgatcctyctaccttggcctaccacagtgctaggattacaggtgtgagccaccgcgcccagacttcctctagatctttactcggctgtcttcctttcattcctatctcagcaaaaacgtcaccacctagagaaactttgttttctcccatggcccaaatctaaagtagctcccaytgcctgttttagctcttagaagacagcctctgagatgatcttgttttgtatttctctctgtctctatgagaagaggagttctgcgagaacaaagcccttgcacttgtctgtctctgtccagtgctgtttcttcctcccacccttggccgagcctagcaggatgcctagcacatagtaggtactcaaattgtgttgagaagaaggtcgcaattcctatctccaagggtcccactgactagaatgagagatggaaaagtcagtaactagttataactgtggtgttgaaaagcagtgtgagaaggagtagaccccaggctgtctgggttctaatccatgtaactctaaaatcgcttgtgcctcagttttctcattaaaatgaggtgaagtaacagtacctttcttatacatctgttgtgaggattaaatctaataaatgtaaagcctgagcaaagtacctggtatagagtggaccatcaggaaatgttagttgtgatgaagaggatgatgaagatgatgaaatggtggtggtggggatggttatggtgatagttgcagggggagagcctaacttttcagggagggcttcacatacgaagtgcactttgagctgaatttccaaaggcaagtagtaatgccttagggcagtgtcttagttaccattgctgttttattagtctgatcttacactgctataaagaactacctgagactgggtaatttatgaaacaaagaggtttaattgacctacagttccacaagctgtataggaagcatggctgggaggcctcagggaacttacaatcatggcagaaggcgaaggggaagcaagcaaatcttcacatggtgtcagcgagagagagagagagagagagagtgagaactaggagggaagtgccacacccttaaaccatcagatcttgagagaactcactatcatgagaacagcatggggggaaatctgcccccatgatccaatcaccttccaatgttaggttcgtcccccagcattgcgaattacaattcagcatgagatttggatgggacacagagccaaaccatatcagctgcataacaaattgtcacaaatctggcagcttaaaacaacacacgtttattatatcacagtttttttgggtcaggaacatgagcacaacttagatgggccctttgccttagggtctctctctggcctcagtgaaggtatcagccagggctggggtctcatcagaaggcttgactggggaaggatccacttccaagctcacatgattgctggcaggatttgattcttgccatgttggtgtctctggtcagctcacaacaaggcagcttacttcatcaaagccatcgagagagtgatggcacaagggacgttataatcttatataatgtaatcatggaagcaatatgtcctcacctttgctgtattctattatttagaagcaagttaggctagcttatgctcaagggggaaggggcattacacaggctgtgaataccaggatttgggggttactggggttgtcttagaatctttccaccatagataacaagaggggaccgagggtttgacaggaggggcaatccaggcagagggaacagcatgtgcaagggccaagagacagggggcaccatgtcctagtgaggaaatgcccatcttgatgggcctggctgaccagtgactggcaaagtgtttgaaatgagggtaagacagggagcaaggatgcatgggctctggtgctggtattactgctcctggtgatgattcagggtatgttccttgctctgggcttccatttccccagctgcgtaaagcaagaggcatgtcctggatcaggcattttcaccctgggtaccagggaagctggggccccacagagaaatctcagggactgctggggaggatggaggaggagtgagcatcccctgcctctttgccagagcagctctgcttcgatctgtgcaatactgagatttctgtatatgattttctttctttcaacagaggcttccatgacttaaaaacaggtgaaaatgccagcactagctgccctcagagarccatcttatgctgaccgcatgtggttctcttatggttcctatgggcttgagccaggaccaaaacctaagaccctgagccagccaaccagtgatattgctttccccatccagaatgaggaaaaagggggacttgaggctgtaccggggttggtggggaggtatgttactgagttactggaaaatccagtttccgagcttgtgatctcaactatttcattcattcactcactcagttgttcatttgttcttttactcactcaatgctgtgttsgcaaatggcagtcagtgttaacgtggggctttattaagtccacctccaaaatgttttgtcaatgcyaagcttgtgaaataagaaactctgattctagccacatcagggaggcaggtagcagtcgaggttgtgcacaccttgtggcttgctctctagagaaagggcaccatgtcagaggccatgtctctattctctggtggaacccatggaaaagagtatctgtaggaatggtgggcagaatggggagtggagatgagtagggtaaggaagagttgacccatagaaggggaaatatatttttgtaatagggtttttactttttagatttgtgggttaaatttctgtaatctggagtgacctgagaagatacttcattcgtcttctagacaggaggcacacacctttccttttgcctctttccccatcatttcctgtcttctctgcatatttttaattttatagaagacactgttctgtgtaggactcagagaaacagctggttctctctggtttgggaactaattgccactccctagctgtgggatcttggacaagtggcccaaccaccctgaactcaggggtccaggatgggggttgggccccacaatttctaagctcctcatggccatgcctgggaggctgggttctgccagactgctgtgtccggaagcattaaaattcattgtcttccctggagccaactctaggctccattaaacagcttgtccctgaggcagctggagctggcaaggggcctgttcttaaaagcaacaggttgtgtgttggcagccgcacaaaggcagccctgggggsgtccagcccctgctgctctccgggcagggagtccaggtggatgagaaaggaaggtgtctgtcctccgggaaggaagggagagggattaccatcaggtggtgggaggggcagctctcctgaatcagaccctggaacacttgaccgaggcagctccacattttggggtctcagtggtacaggtgtggagcacatgcagggatgagctttggagggaccagaaagacccccctccgctggaaagacaaggcacaggaatagcagcagctgatgcttgtttatttttttattctgtataagttagttacatgtattatctctaacatctaagatggtgtggggccctgtgggaccccattttacagaggagaaactgaggctctgagacctcaggagacttattctaggtggttcagctggctccaaagccycccttttcccagctaagagattatatgagggctacaggaagaggatccctgtgatcctggagtttggcagggtgggtatattaggttcccagggctgccatacaaattctcattatcataaagtgggttgcttgaaacagacatttatcctctcatggttctggaggctcraagtctgagatgaaggcttggttccttctggaggctctgaagaagaatctttcccatgtctctctcctggcttctgtggtcgttggcaatccttggtgttccctggcccgtagacacgtctctccaggctctgcctctatcctcacctgacattctgccctgtgtgttctgtcttcacactgtcttccttccatgtgtgtctctgtattcagatttccctcttcttgggctgggtgcggtggctcacgcctgtaatcccagcactttgggaggccaaggtgggcggatcacctgaggtcaggagttcgagaccagcctggccaacatggtgaaaccctgtctctaccaaaaatacaaaaattagccaggtgtggtgtcatgcacctgtagtcccagctactcaggaggctgaagcaggagaatcgcttgaacccaggaggtggaggctacagtgagctaagattgcaccattgcgctccagcctgggcaacagagcaagactctgtctcaaaaaaaaaaaaaaaaaaagatttccctcttcttgtaaggacaccagtcattggatattggattagggctcacactactccagtatgaccttatcttaacttgatgacatttgcagagaccctgtttccaaataaggtcacattcataggtactggttggttaggacctggacatttctttttcrgggacaaaattcaacccacaacagtggggatgtctgtaaggcgggaatgtgcaggggcggagttgggctgaagggaagtgaactcacttctgcctctttctggttctctgggctgtgcacctgggaacagggctccttcaccgctcatcaccagctgggaacctggttgctggagaggccaggtcatgaggggcttataggccttggtaaaggctttggacctgatcctggactaggcagagccattgaaggagctgaagtggaggtgtgtatggtcagagtgcatggtgagcattgggagggggatgcaccgggcggggacaggagaaggggggcaccggcctgggtctcagataatgacggcccaggggagaggagcagggcctgaagcccagaggggagaggagggcggctggacaggaatccaggtggtcaggtgggcaggccttgctctcaaagggagagggcgggagaggagggaacatttgttgagtgaattgaaggagtctgtagcgaaggagggtggattgtccctaggaggagcaagagcatggtgggagggaaggaagtgggaagagaggcgaggaaaccagctcactccatctcactgaccgcggattcttctcccagggaaatgtgggaacsaaattaatcctgaagcttccccaggtttctgtgattctcaaccagtgtgggctggagcaatcagagaagccttcgtgggggtgtaggtctgacttgggggaaggaagtatagaggcaggaaagcaggggatgcatttcaggggtggggacaacctgtacagaggcccagggctgaagctgagtgcagttccacccagggccagagaggaccagctctgctgtgcggagaggaccttttccagccgcagcagcagcttctgtcctccagccgtggagatgtgcagttactccccctcatcaatatttcagccttgactttcacaaagcaccccctctgcctctttgcctcccccagcagcctgggtgaataaagggaagagctgacgctgtccctgctggtgggcatgccagggccagagcgggacctgtcgaagccttcgcacctgtctgtgacttgaggtagatgagacttcttgaaaccgagcccctagccctctgcctggctgtctcctaggccccttctctgtacctgtctttatgatttgttttaaggaaaagctggggagggagctcgaagtctccttattctctgaatgatgttcatctgaattgtaccaattcctgcaaattggaggcccccatttctgtaccctctccgcccctcccctcccaaagtgtacagaattaattctgttgactattgtcattctctctgttcagcagaaattcccccccccgcccccccgagacaggttctcactcttgtcccccaggctgcagtgcagtggcgcgatcttgggccactgcaacctccacctcctgggttcaagcaattctcctgccttagcctcccaagtaactgggacttcaggtgtgtgccaccacgcccagctaattttgtattttttggtagagacagggtttcaacatgttgccmaggctggtcttgaactcctgacctcaagtgatctgcccacgttggcctcccaaggtgctgggattacaggcttgagtcaccgcacctggcctagaaatttttaattctaagtcctcgggcaccaggagcatctctaatagagacttttcaaaaatgattttaggtttctatgtgggtgactgcttcctaagcaggtgagtaacaaacccatcttaatagcacagctgcattctccattggaggtgggtgcaatctgcttctggacggtaggcttctgaggcaggagtgtgtcttacaaggttgtgttcccaccgagagggaggagctgtggttccccagtatcaatcagtggggtgggaacagggacggtgttgtcttttctgtgcttccagaacaccatgggactctcctagcacttctgggcttggctacctctctaggtatcgcctctctaagctgtaaactcaaggacagggatagtattttgtttttgtttttcagttgctgtatccccagagcctagcacagtacttggcatgtagtaaatgttcaacaaattaattcatccattcacttctcaagtacttactgagcacctactatgtgccagccttcattccaggactaaggagatggcattaaagtaaacaaagtccctcccttcatggagcctccattctggtggggaagacagactgtcaacaagtgaacacggctgggcgcggtggcccatgcctgtaatcccagcactttgggaggccaaggcaggtgaatcacctaaggtcaggagttcgagaccagcctgaccaacatggtaaaaccccctctctactaaaaatacaaaaattagccgggcatggtggtgggcgcctgtaatcccagctactctggaggctgaagtgggagaatcgcttgaacctgggaggcagaggttgcagtgagccaagatcatatcattgcactccagcctgggcaacaagagtggaactccatctcaaaaaaataaaataaataaaataaaataaaataaacacatgcatggtaaataacataatttggggtaatgaagaatgccatttaagcagggctaggaaatggagtgatgaagtgggaaagctataggttggtgcaaaagtaattgtggtttttgccattttaaaagtagtggagaaaacagtaattacttttgcaccaacctaatattttggaaggtaccgttgaggaagtcttccctgaagggtggcttttgagcagagactgaagggatgggaagggtgagccatgggaatttctaagggaagagtgtttgtggcagagggaataccaaggacaaaggctcagagttggggatgagctaggcatgttagaggaatgatgaggctggattgggtgggagaggcaggcaagggttagattacatagggtcttaatagtcaaggttgggtgtttgattgattataatccaggttagtattgaccagatgcacatgaaaggcctgcaggaaaccaaattagtattgaaaaaagataaggcagttgtatgaatatggttctgttcaaccctgtttgcagtttaccttctgctcatagatagagaggcactgctttgtagttaatctaagaattcaacatggcagaggagtgggaaggtttggttgagccatgggggggttcatggtaccttctaggaattcagtctttgatggggtgaatttgatgtgtgctattcaaactcaaaaacatggatcagcaccgggaagcatcttgagataggggtgggaagagacggtcatacctcagcaggcagcattagtactttatggtactttataattgggcagcagaaaaggcacaagacttgaatttgaaagatarggtttctagttccagttcctccacttatggagtggtcttggatttgtcatttaacctctacaagcttagtttctgcaggtgatgtccttgttctgcttttccatagtgaatctgaaaaccctttgcaaactgttgctgctacatcctccattataaacccttctattagactgtgagctcyttgagtatgggggctgcatttcacgcattctgggtctcttggaattagcagaatgccaaggtgctcactggatttgctgtgaatcgaattctgctgtgacattgctgtggtcagccatgtcttccggggacagagtctgcaacagaagtgtcacataacctgggagaagagtgctcaaattggagctgaaattctagctcagtgacttagaggggcttggcttagactagtcacttaacttccttatggtactttttcccatctgcragatgagtaagataattttaccaaactcatgtgctgtttgtgagggtcagatgaagaaacatgagtgtattaggttataggactggctgctattccatggcaacggctttcagaagatgggagttcatctctcactaaacagtcctgacatggcctgatgtggcgacgccatggcatcagaagcccagacccctcccatcttgttgttctgcccccacactgagggttgaccttatccatgtagcccaggatggcyctccactacattcttatcccttgcagggaaagggggaacagtgacaaagggtgtcttcataatcccattggccagaactgggccatgtggtgtacttcttgttcaaaggggtttttagctggtctttattctaggtaccagcgtgcctgactcagtttctaacactatgaaagaaggcaagaccaggttttggggaacaagtgaagtctctgccacagcaaaataaaagataattctgaattttgaagtggaatgattcagggctcacccacagcttgaattggaaatgatttgattctgctggagtctaatggaaaacaacgccctgtatcttctgtattattattgtcattgaatgcttgcttggtgccagccactgcgctaagggtttcataggtgctatttctggttaatcctcacaacggtcttactgcgtaggtcccattattaggtccattttttttttttttttgagacagagtctcactcagtcgccaggctggagtgcagtggtgtgatctcggctcactgcaacctctgcctcccggattcaagcgattctcctgcctcagcctccggagtagctgggattagggagactgaggcttagggaagtcagaggagggattggaacttgggaatgctggactccagagctcataccctcaatagctcctactgcccagtctcctggttccaatctggtgtttctgctctggatatatctagtttttctgcccccaccttcctggctgggcctcgtttccagaaatgccactgacatggaggggacactagtgctctggttggtgttgttcctagcagcactgtcatccacccgaaatggaattgattcgcagaaatacgggtcaccacggaggagsctgctcatgctggtaggagagggcttaggtcccacagaggtcaagtgggcagggttaggaaaaccagctctaggtggacagatatgatttgggaattaccatttcgaagggatttagacttcctactgcctttgagggtcacctgcagctctgtaaacacagagaagatgaggccatcttccccctgcacctgagttactctggtaggaaaaagcgcagagcccgtaatagtggtcagagcctttgcttgagccttccagaaccttccctggcccagagcaaaactcaaaagtctcctcaggctaaagtgactgcactttgtcctgttggcaaattggttggtttagtgtgtttagaattcagcacccatttctcaatgatatcaaaatcattatccaacgaaaggtgatcgtatcctggtttagttgcaagattttagagctcaagggggcttaggcattattaatccaatccttatctcacagaggaccagaaagcctgcctgccgggcctgcccagggtccggtagctacgttgagttagggctgagtmtttgggggccctacctgagcatgagggacaggactttgtgaattctcatataggcaacagaggtggcaattcatgacgactggacatttgtctgcctcttggcaccttctcaaagcacataatgggttaaaggggcattcttgattctccactgtgttggcttaccattttggtgcctcagtttccccatctgtgaaatgggtatggtagtaacagaactcacctcatagagggttgttgtgaagtggttttttttgttgttgttgtttgtttgtttgtttgttttagatgtagtcttgctctgttgccaaggctggagtgcagtggcatgatcttggctcactcaacctccgtccccccgggttcaagtgattctcgtgtctcagcctcccgagtagctgggattacaggcgctcactaccaagcctgactaatttttgtattttcagtagagatggttttgcctgttggccaggctggtctcgaactcctgacctcaagtgatccgcctgcctcggcctccctaagtgctgggattacaggtgtgagccactgtgctcggccattgttgagctgatrgtgtctgctgtgcttagaccgtgtccagcatgagggaaacactcaaagcagtcgttgtgatcacttccatagtagcctttttcactctcgctcaaggggctgtatgctcctaagaaagcttggggatctttgtctcattcatctttgtatttcctaggtcacatcatccatcagcttaaaaacttttttgtttaccttgactatctccagtgtgccatgcatgaattcttcaacagtcataatagccttttcatccataaatgtaattttagcttgtttaatagcctcgcagaacatgaccttttccatgataaattggcaggaaataaacccatccttcttccatggggtagactgttgagatggtgggggttggtgttcttgttctggatctggtgggagtggttgtggatgtttgctcttggtggttttcagcgcacatgtaaggggctttctggggttgtatggttcgggaggggtttggagtaggctctgcttggccctggaatgggtcaggtggggagcgtttctcagtttcttataggtgctcagttgtcatttgactccacagcctgctcttagttaccctctgtgtaagtggttctggggtctggcactactaaggtgtggctggaatatgttcctgggacagttatttgagatctacgtggagacacccaggagcatcgaggatcaggtagactcagtctctgcccctaggagctctaacaaaaccctgtttccccctagtcttccccttttctgcagctccaaggatgagcaccccccagagtgggctgagacctgagcttcccaggtgggtctcctcggtgtgtcttcatagttcagcaaacacctgatgtttccctgtggggaccagcccactggggcattacagaagcccagacacactccagagtccaaacacttgggtgtagatcccactttgccactctgtggctcccagtctgggacagtgcgggaggcacatgtggaataaatctgtgttggacgaatgacaattagtgtgttgccttgggcaagtcatctcatctctcaatccctcagcttcttatctctaaagtagagatcatagtgtccacctcatggtgctcttgagagaattaaatgagatagtgcctctgaagctggaaccacagtgctcagggtttagcrggtctgcaaacaatgtaactgttggtgttatgatattattcctgtggcccctcactgcaaggctcttggagcctagttccctcccaatattaagccttgttaaatcttgcctcttttttccccaagtctgcctaaggatagaattgtccaagatgcacatcggtgatcctttgccaatgtatttgtattcgtacattttcatactgctatcaagaaatacccgagactgggtaattgataaagaaaatgagatttaatggactcacagttccacatggctggggaggcctcacaatgatggtggaaggtgaaggaggagcaaaggcacatcttacatggtggcaggcaagagagtgtgtgcaggggaactgccctttatgaaaccatgagatctcttgagatttactcactatcatgagaacagcacaggaaaaacccacccccttgattcaattacatcccaccaggtccttcttgtgacatgtggggattatgggagctacaattcaagatgagatttgggtggggacacagccaaaccacatcagtattattttccccccaataagataatttgccattcacatctagggtgactccagtggtggggactcaagggctccctggtggcgaatggtggtaggtggagaaaccagctgtatctacctctgaattcctatcctggaagggactcttgggaccacctgggcagcctccatgttttctaggatttttttttttttttttttttttttggagacagtgtctcattctgttgctcaggctggagtgcagtggcatgatcttggctcactgtaacctccacctcccaggttcaagcgattctcctgcytcagcctcccgagtagctgggactacaggtacgtgccaccatgctgggctaatttctgtatttttagtagaggcggggtttcaccatgttggccaggctggtctcgaactcctgacctcaagtgatccacctgcctcggcctcccaaagtgctgggattacaggcataaaccactgtgcctggcctctaggacttttgtaaattgtctacctgagtattaacccatggctcaggaggcccccagcactaagacgctctatcaccagtatttgaggagtcttcaggcagcggggcagggagtaagagacagaacaaatgctccaggatgaggagacccaggggatttgygcggctccggcatcgccagcatagttgttaggaaacctgggctaattagggtgctctgttgttcttctcagcaggcccttgaaattgggcagacttctggctcacctcttagagagaaaggaacactgtgtaccactttctccctgtgtttgccacagggaaatggctatggttgctgagaagttgggacagaacctgcaggcgtgtgcttaccacgtttcttgggagagcagggatggtctgtgtggcagccacattctcactcctttgtgcttccccttttgcctccattcctaggcctgtgaatgttctagattctctggacacactcagccttctggagtatgtccaggcagcatgactgtggcatgcaaaaaacaagggcttggaagccattctctggccgtgtgatgttcatgagagttaacctgatgactctgtgcctcagtgtcactgctctaatgggaatctagaatattcttcactgagaggttttgaggctttatggtcccccataaattacttctttctctgttctttcccctaagccctatctcaaagtctattccagtccttattgtcacttgtgtgaaattctcctttctctgctctttcttctaaattgcatctagcggttggggtgggggggcggtctgcctacaaaatgaaagccactcataatggaaataattttagactcacacaggagttactgtgactcaacagctgaacaaaaacgcttggtttctcatgctgggagatagtcctccatccccacaggtcctggcagaggagcaactttgtgactttcacctgaggacctgtggggtgtgctctcagggattgtgagggtgggttctggagggatcttctcaacacagacagcctttttcctctctttgcagcagagggactcctttgaacccatgagtgtggcctttataactcaatgctcagaatgtttgaaagaataggtctttagaaagtcgaaattaccctctgttcgggaaattacaaacacctacaggtacatacacctcccatgttcccctagtgtgagtacggcagacatcactaatggatcccagcacctttctctgtgctgaacctgaatggaaccttagaatcttttccccatagtgcctgagcctgagaaaatatatacttttatagttatagaaattgagacccagagacttaagtatctagtgtaaggcagtcttcttgtaaggtgaatgaatataaatatatatasacacacatgtatatgwaaattttatgttggcaagttttgcaaattgttcctgatggaacacctcccgcccaatacatttaaatctgaggttctttatcaggaccaatttgcaaaacttgttgctgtctctaaagaatggagtacactatcacactgayaaagtagtgtatcccttacgcttgccagtttgagctgcaggaatatttgggaaaatgagctgcatgtgtcagatgggccacatcacctggagcaggcagaatgcacctgagatggaggatgactgacaagttggaacattttttgctaggcaaggaggtgcagttacaaaatatctgcctgcttcaatcagatctggcagaaaatgcaatcctttcctagagggtagagaaacatttgtttgaaatgattagtttctttttgggtagaaaggtgttccctgggtggatgttttatgaggcttatgtctgtccctctctccctgcctcttcctttatttccttttgtcctttaagatccagctcccttctccaggaatcttcccctctgctgcctgcccaaagtacctctagttccattcctgttgaaacacttaattctgtccccagtgagagcctcacagctccacctagcatgagctctcctgtgaattttttcctgtgtacctgacaatgttgagcaaggatccagggtcacacagcccatgagctgtgtgcaaagtttagaggttgccatggtctgaatgtttgtgtaccccccacaaattcaagtgttgaaacctaatccctaatgcaatagtattgggaggtgattaggtcttgagggctctgccttcatgaatggaattagtgcccttataaaagaggcctgagggagcctcttcacccctctgccatgtgaagacacagaaggcatcactgtttggtgccttgccagacaccgaatctgctattgctttgatcttggacttcccagcctccagaactgtgagcaatacattgataaattccttagtctaggatattttgttatagcagcaggagtagactaagacagagataccaagtttgtctgtggatttgtggcttcccagggcaggtgagcctggaggaaggactcgtatgtgtgttgtttttctatgccaggagtcagaggttgggctgggtcccatgatcagggctgctgtttagggccggggtcttcctgtcttctggccttgtgaatggcctggtgctttgcctggcgagaggagtcagactttcctctcttgctgcagtgtgttgttgctgctctgctgtctagcagctaccgttgccatggagcagcaagaggtactgtgccagtggcccccstcccactgtccttgcaacagctcctctgtctgcctccttagccctcagccctgccatgggatgggracagaggagactgcagcagcaagtgtggctgattttaattgatttctgcttggtacacatttactgrtgagctgtaggtcagcaacttccaacagagctgagatgggaagagaatggctggctgcctagttgcttcctgggactttgaatggcatcttggcattttacaaatgtgatcatgggagctgctgatgggacctcccctagagatacaatgacagcggcacctgtcatctctactattatctataatgtggcttgtatttatcaactcacttaaacctgcaggcagtattatctccattttacagataaggaaactaaagctcagagaggttaagtaacttgaccaaattaacacagtgaaaaaggggcagagctgggatccaatcccaggcaatatggctttatagttcatgttcttaaccactattttatactgcctctgtatttctaaactaaaagttgaaacctaccattggagatctttaaaaataaaagtaggtcattagctctttaagacagtctatgtatgtagcgacatttattaaatactgactgaataaagtacctaagagtatgccaggtactcttctagttgctctcatgtattagctcattaatccccacaacactcctgagaggtaagtattattattttcatccccattttgcagaggagaaaactgaggcatggagagggttagtatccacggtcacagagccaggatgtgacaggactggaacccaattgtctggctctagattctaaataaaagtgaaactactagcttatgaaacaaaatttgacaaacctctcaacttggttattctgacggaagaaattctaggaatagagaaccctcctggagttaccgtcttagttactagagctcagtttgtgagactccatagcttttcagaatattttatattctgaataaaaaaatgcacacaacaaaaacaaccagatacatttgttcaaaggaacgatcctcaggatttgtggacagttcacttcgagaccagtgtctcttacaatctcagttttctgtcctgagcagttaccttcaaaacttaggggaagagctcagaggatgtctgagtccattttgcatcttcatcacacagagctctgtggctgagtgcatcatagctcttaggtacagcagacctattggattgatcagcagcagaactgttatgcctggggtaagaacataatgaagtgggggagattccaagctaggaatttggggcccagattctaggggatgcctccagggttttcaggctgcwccttctccattgatctgcccagtttatggagccacaggggaataagtcctgctattgaaggtgatgttggtgcaggtggtattggggtggcaccattgaccatgctgcactgggagtccccaaccctgggctttcccttttgaggttcagtgtaggctcttgattctgcttcataatcttactttacagttggaggaagaggacgggttgcgaaaggaacttcctttgcatgcggtcagwgtgctgggccatctgaacagccccctccacrgtctgcaacatttctacattctgatagaaacagttagtggtcttgacgtgtctgacaacctacaaaaccaacatatcctggggtttgatctctctggtggtgtcagaggagtccaaagtgagcatctgwaagctcggctgtgatccagcctatttgggaggatctstattaaaccagtgactgccctccccaccccacctctactcctaaagggttctgtttcacaagagccaggctcaggtacctgtttttctccacccacaccttgtttattcctcttttcctcactgtcttcgttgttgttcttgttgtatatgagaaaatcgactcatttttaacatttcgcaagcctccccctcccactagtaggtgtgtgagcagctgcagattttaccgtctgtaaaccttccacactccagcagatcctctttccacctttcagcactgtgcagcccacccaagccacgtgccttcttggtgtcccatctatgcctctctctgaaatcaggaaccaagctcactggggatgagcatggcaggacctcaggaagaagcctactcctttccttcctgcaagaaaatgtgccaggcatttagtattagggatacagaagtggatacacaagattcttgccttcaagcaactcgggaatttagaaggaatagcaacagtattaacaattgctaccatttattcagtttcagtatatgtaagccactgcactttttttttttttttgagactgagtctcgctctgtcacccaggctagagtgcagtggcgtgatctctgctcactgcagtctctccctcccaagtgcaagtgaatctcctgcctcagcctcctgagtagctgggattacaggcgcctgtcaccacacccggctattttttgtatttttagtagagacggagtttcgccatgttgaccaggctggtctcgaactcctgactgctggtgatccacccaccttggcctcccaaagtgctggaattacaggcgtgagccacctcacccagcgcactgtgcttttcctgaatgatatcatctaataattctcaaaaccagcctggaacgtaggaattcttgttttcatcttggagatgagaaaatggcagagaggataagttaatcagctgaggtcacatagctagcaggtggtggactcagtagtttgtctttggaggacagacaatttttttttttttttttgagatggagttttgctcttattgcccaggctggagtgcaatggcccgatctcagcttactgcaacctctgcctcctgggttcaagcgattctcccacttcagcctcccaagtagccgggattactggcatgtgccaccatgcctggctaattttgtatttttagtagagatggggtttccccctgttggtcaggctggtcttgatctcctgacctcaggtgatccgcccgcttcggcctcccaaagtgctgggattacaggtctgagtcctgcacccggcgacagacaatattattaagaacaatgttgactgaacgcctccagcgtcccacttgtcagtgcttgtagacacaggctttcagtctcctgaagtgctgtggacactttgatcagagagggtcatggcttgtgaggatcaccacacaagaggaagtggcagctcaggtctgatgatgaagtttgtctgactccagacctttctggctcctaacccctggaccgtatcacctctcatcaaaacagtgcaagatgtattatcaaatccagccactggttagactagaaaaaggagctattaggagtggtgacagagggcatccctgtcttgtgccggttttcaaagggamtgcttccagtttttgatcattcagtatgatattggctgtgggtttgtcatagatagctcttattattttgagatacgtcccatcaatacctagtttattgagagtttttagcatgaagggttgttgaattttgtcaaaggccttttctgcatctattcagataatcatgtggtttttgtcgttggttctgtttatatgctggattatgtttattgatttgcatatgttgaaccagccttgcatcccagggatgaagcccacttgatcatggtggataagctttttgatgtgctgctggattcggtttgccagtattttattgaggatttttgcatcgatgttcatcagggatattggtctaaaattctctttttttgttgtgtctctgccaggctttggtatcaggatgatgctggcctcataaaatgagttagggaggattccctctttttctattgattggaatagtttcagaaggaatggtaccagctcctccttgtacctctggtagaattcggctgtgaatccgtctggtcctggactttttttggttggtaagctattaaktattgcctcaatttcagagcctgttattggtctattcagagattcaacttcttcctggtttagtcttgggaaggtgtatgtgtcaaggaatttatccatttcttctagaatttctagtttacttgcatagaggtgtttatagtattctctgatgatagtgtgtatttctgtgggatcggtggtgatatcccctttatcattttttattgcatctatttgattcttctctcttttcttctttattagtcttggtagcagtctatcaattttgttgatctttttaaaaaaactagctcctggattcattgatcttttgaaggtttttttgtgtctctgtctccttcagttctgctctgatcttaggtatttcttgccttctgctagcttttgaatgtgtttgctcttgcttctctactttttaattgtgatgttagggtgtcagttttagatctttattgctattcaacatagtgttggaagttctggccagggcaatcaggcaggagaaggaaataaagggtattcaattaggaaaagaggaagtcaaattgtccctgtttgcagatgacatgattgtatatctagaaaaccccatcgtctcagcccaaaatctccttaagctgataggcaacttcagcaaagtctcaggatacaaaatcaatgtgcaaaaatcacaagcattcttatacaccaataacagacagagagccaaatcatgagtgaactcccattcacaattgcttcaaagagaataaaatacctaggaatccaacttacaaggatgtgaaggacctcttcaaggagaactacaaaccgctgctcaatgaaataaaagaggatacaaacaaatggaagaacattccatgctcatggrtaggaagaatcaatatcgtgaaaatggccatactgcccaaggtaagttatagattcagtgccatccccatcaagctaccaatgactttcttcacagaattggaaaaaactactttaaagttcatatggaaccaaaaaagagcccgcattgccaagtcaatcctaagccaaaagaacaaagctggaggcatcaygctacctgacttcaaactatactacaaggctacagtaaccaaaacagcatggtgctggtaccaaaacagagatatagaccaatggaacagaacagagccctcagaaataatgccatacatctacaactatctgatctttgacaaacctgacaaaagcaagaaatgaggaaatgattccctatttaataaatggtgctgggaaaactggctagccacatgtagaaagctaaaactggatcccttccttacaccttatacaaaaattaattcaagatggattaaagacttaaatgttagacctaaaaccataaaaaccctagaagaaaacctaggcaataccatttaggacataggcacaggcaaagacttcatgtctaaaacaccaaaagcaatgggaacagaagccaaaattgacaaatggaatctaatgaaactaaagaccttctgcacagcaaaagaaactactatcagagtgaacaggcaacctacagaatgggagaaaatttttgcaatctactcatctgacagagggctaatatccagaatctacaatgaactcaaacgaatttacaagaaaaaaacaaacaaccccgtcaacaagtgggcraaggatatgaacagacacttctcaaaagaagacatttatgcagccaaaagacacatgaaaaaatgctcatcatcactggccatcagagaaatgcaaatcaaaaccacagtgagataccatctcacaccagttagaatggcaatcattaaaaagtccggaaacaacaggtgctggagaggatgtggagaaataggaacacttttacactgttggtgggagtgtaaactagttcaaccattgtggaagtcagtgtggcgattcctcagggatctagaactagaaataccatttgacccagccatcccattactgggtatatacccaaaggattataaatcatgctgctataaagacacatgcacacatgttaattgtggcactattcgcaataggaaagacttggagccaacccaaatgtccaacaatgatagactggattaagaaaatgtggcacatatacaccatggaatactatgcagccataaaaaatgatgagttcatgtcctttgtagggacatggatgaagctggaaaccatcattctcagcaaactatcgcaaggacaaaaaaccaaacaccgcatgttctcactcataggtgggaattgaacaatgagaacacttgaacacaggaaggggaacatcacacactggggtctgttgtggggtgggggttgggggagggatagcattaggagatatacctaatgtaaatgacgagttaatgggtgcagcacaccaacatggcacatgtatgcctatgtaacaaacctgtacattgtgcacatgtaccctaaaacttaaagtataatwaaaaaaaaagaaaaaaaraaagaaaaaggaactattaaaaatgactgtagaggccgggcgtggtgactcatgcctgtaatcccagstctttgggaggccaaggcaggtgaatcatttgagttcactagttcaagaccagcctggccaacatgatgaaaccccatctttactraaaatacaaagaaatgagccggcgtggtggcatgcacctgcaattccagctactcaggaggctgaggcacaagaatcacttgaacccaggaggcagaggttgcagtgagccgagactgtgccactgcaccccagcctgagttacagagtgagatcctgtctcaaaaaaaaaaaaagagtgtaggaccacaggcccacaggcataaactgggatgatcccagggtgacggggctttgtgtttgccctaaacaggatacacaatccagtaaacaagtattttctgagtgtctgctgtgtgccagacagtgttcttgctatgaacagaaraggccccaggagcttgccattaagggatgcaggaggaactggggacagggatgaggccatgtcrggtggggacagtgctctgaggaagacatgaaaggtagtggcattgcagggatgagggtgccaggaaggcctctgcgagtcctctgtgataatccgggtgaagggggtcttaacttagacaactgataggcaaagaaaggcctgggagcaggaacatctgtccgtttgaaggaagtttcctgggtgtgttctgagtgagctgctgagtggccagcargtgctgttctgtggggttgggtggagtgcaggttgcagcctggcctgcatgagccagctgtcagggtaaaggatgccgagccacagagtggtcctcttctgaaggaggctgttctgcaggcaacaggtttggaggccactgcttcgtyrgaagggcccgtcctgccctttcctacttcggcagtgctcagaaattgcttatcggggtattccttggtctctgcctggggagtagaggaactcaacattgtaaataaaagggttagcttcttcaaaattcattcttgtcttctattgttagaaaccaaagctcatgcacgaatgccacccaccctgtgattacaaaccatggccctcgggtgggtgggtggcatgtgtgcatgagctttggtctctaaaatagaagtgtgagaactgttctctcttatgcctgttccctcccaagtacagtatatccatgtcaacttactcacaggcgtgatggtggttcacgttaagtattcactgtgcttctcagtggcaggagagcttttcttgccttagcctactgtgtcctcccaggaactctatgaactaagtactgtgtttattcctgctttcaagatgtggaagctgagacccagagaggtgaaacctaaggagcccaaggtcacacgcttggaagaacaggggctggaatccctgacacagtgggcctagcggaagccagggcaggtattagcaggcccattttgcagaggggaagactgaggtgcagtgatgcaaaatgtgtggtggagggctgggcctggaatctgggagttctggttccgggtgaccgtmcactagaaagggaaaggtggcagaaccatatatatgagcctgttacttgttcaaggacttggtcaggggcctcacagaacttggaaaagagcaacggactcttcagagaagttcttcagagaagagctctgaactggagagcaagagctgggagcacctcccatggctgcagtctctggtcatttccaaagcccaggagaaggctgcatttggtcaaccacccacttccatttagccagggcctttaawtcattcccaaatccttaaaaatcacctggaatgtgtttaaaagggcagatttctgggcctcgagataggcctattgaatccggatctggattttgggggcctaggaatctgcattgacaccactccaggctgcgctgagggacattcacgttcctccaacattcatgttgccattaagggatggaggaggaactggggacagggatgaggccatgtcgggtggggacagtgctctgaggaagacattcagggtggtggcattgcaggggtgagggtgccaggaacattcatattggagaatccctggacctcggtactaagactccagaggggtggaaatgactgtgggttcagtctaaggctccaggtggggtgcttcaacaaaagaccatggtcactcagggccagggcaaaggttattatcagcagccccagacactttggggacrtgctggaaatatctgcctgacagagtgtttctgttttgcaccggtatgattcgtgtatctgagggctgcagcccttcattttttttttttttttttttttttttttggkatttaagaaaatggtaaaatacacataacataaaatttaccattttaaccatttttagtgtacagttcagtggcatgaagtacattcacgttgtgttcatgcagcccaaacttgagagctctttttggaacactccaggaaagaagggctgtgtacacactaggtgcttaataagtgctttcagatgacagtggggtggtgggattatcggggtrgtaggctacattatcatggattaagtaagcattcccactctgtactttcttaggcaacttaacttcagtctgtaatgctgaggcagacactagtgagctacgtttaacacttcatttctatttctgggtgaagcaggatgatgagttcattgtctggtcaatgccaagggcaacttcccctgctttcctaggctcccatggcagaatagaggatatctgtgaaaaatccaaattttcctcctatgtgtgtgtcgggtaagggcagcccacagttatgactggggctccagtttcaaatgccgctgactcaagacckatctggttgagaaccaaacaaatgggcctttttatactgaagaggagatttttcttaccacgtgtcaacaaaagatctgtagacaatcttgttatacatttcacactgctgacttcataagtacaacagcactcacgacccctttacattttttggtgtatttgggtttatttctgtggttaccatgcactgagggaagtccacaaaagccagcctgttcagggctggagcacggtgccagtggaattttggtgaacttcacagcggtagaagggagtggactgggaggtgcagaagtagtgaattttgcagccggaaggaatcttatatagactaaatccccccttatttatagatgaggatatcaagacccagcaacagggggtggttctgacctgaggtcacatcgctggttaggatctcagcccatcactgacttcctggtctccagacccattgacttgccactgctcggatcttcccagtcgttgaaccccgagttccgttgaactagatgccttgtaatataatacacctaacgataagttttcctgaattgaatattcttccgaaaatcatttatagatttggtgacttctccatttttcttttcctgcatttgggtagaatcartctttggctctgagcagatctttctgtttgagtgtctttcctaagatctttatctttctggttgcattttcmgaaccccctgcctctattgtgatgagagcgctgggtccgttggctgtctctctgggatgacagcacgagttgaaaagtggagaattgagtcatcggctttctggcgtggtttattctgtcccagaatccctaagtcctgtctgatactatttagtcactgtccttgcagtgtgaaaagtgattcacatgtaagccatggaaagcgctcagcaagctctctgagacaggaattcttgaggaggcaaaagccaacagtgttaattggagatagagagataggaattcttgaggaggctgtgaaaagccaacagtgttaattggagatasactgccatgtgagagccaaacccctcatgttctcaggtaaaagctaggaaaatgttaggctcttgtgacatgcagttgtctcagcttcaaagctggattaattaactcacgtaatgcaaaatgtttgttgagggcctattttgggcctggtcctactcaaagtagcaacaaaaagcaacttgatgctgtctttgaccagaagaagccatgagaaggtgcccaggtacttatcaaaggscttggttacatgcccctgtttccttgttacccttaagcaatgagagagagatgcttgaagaagagcagaagctctgcttgctctttaagcttggcgagggttgggtctgtttcccctcctccattcctgggcwcctagtaccatgtggttgctcagtgaatatctgctctttctttytagccttcatgtgggaggcagttgttgtgtagagggaataagactagacttgggtccaatttacctgggttgaagtctttgccccaccactttgctcttgtccctggacaagtcacttgatgttgcccagcctccatttttgttgcatcaatagagtggagatgccagcgattgatctygtgaccttgggggcatcacttaacctccctgaccttggatttctcatctttaaaatgagggacactgaagatgagtgtggagcacatgtcggaacagacaatgaaacaggcattcgttattatcattcccatgtcagaaatgggctactatcttactgttttatctcaaatgtaatttcaagagaatgatacatggtaacgtgggtaactttcatttgtcaatgtgtggatgcgccgcccctctccccggggtgtattcctcagcagcccggcaggggagggcacatccacacattgcctgctttaaatctgttgcccgctctaattgtgtagacccactacacccaaccagcttgtatcccacagatggaaggtaatttgaataactgtttaagccaaaatgtaattggagataaaagctaaatgtctaaggtctagcagtatcaagatgaccagaagtgatgcattggatcctctgctgcttctgaatcatctgggttaattaccrtactctccaccagctttggtcatcaaggagcacacagaatcattgcttataattgaagactgtggacaatgatcacataagatcatccctaagttaccagtcccttttattctaatggacatttgaagaaaaaggcctgaactttcaataaaagcgtcgtctttttgctttcaaggcccttcagctagttcattaggggattgaagccagacatcatttgtgactttccccctacatttggggaatgggggatagaatatcttttgtggtttttgtttacaagaaggaagatttcaggcttgagctggagtaygaaaggaaattgaaactaaagattgggttctggatttgactaaagtttctaatattgttcagccacaataaagccaaaagcgttcactgtatgctctggctgatatagtaaagcatgggcatttaagaaaagggttaattaggtcaattagattagatgttaggctgcctgtttctaaataccatgggatgtaatttatttcagtggagctttaagccctcatgcatggtagacatgtcgattatggataaattaaaggcaaaataaatgaatattcagtatgtcagacacaatcagagaatggtagaaaaatatgtaacttaactttcaacctctataacagctaggattgtgccccatgcaaagcttcctggaagtttgggagcccaattttttctctctacttgttgtaatttacttctaggatatagctgggccaggaggattttgtcaagaaatgggtgctcagtcttctgaggctccatacttcagttggaaggaaggggaattttcatatttcttgttttctttttttgtagagacggggtttcaagtccaggctggtcttgaactcctggcctcaagcaatcctcctgccttggcttcccaaagtgctgggattaaaagcatgagccactgcacctagcctgggttttcatatttcttataattgtctcagaactttcagttccaatacactcatcgtgaaaagcaagtgaagccttgaatattgatgtttattgagatcaggacaaagtgaaaggcaaaaatctgagtgccttttctgccttttctggtgtttttctggccctcctgttctgtcctgatttctgtccctgaactcctgaccttggacatgcaggagctacttctcccatcagccttttctgagtagaacctctgataaatggatgcttcttgcatccttatccttgaggactttggactctgatcccaagggtgttggccttcattagcttcagggtgttgacttgcattagcttctgctgggggaacaacctcaagcttggccaggtggcagatatctggaagtcttcatgacatactaatatttgttgagatattagtactatctatgtttatatatgtatatctgtgtttatgattcaagcacagctgtgtcaactgtttaacaaagttttatgggagaaagcttgataattgagraaaatttatccctatttatttatttgaaccacaacttcttgtagtttttcagactttgagaaagctggttatgatttgatgtagtggccaaacattgtcgagtgactggaaaccgttgatttaaaggaacactgcctgggatttctggcctcagtgagggctgaggcagttatttggtgggcaggagggtggggagggtctttctgggtactgctgaagacccactacctctgtctaacctgacagagacttccccagctgttcatgacatccagggcagtgaccttggctgtgtgaggagtggctcgggcmcaggtggtctcaaagggcctgttaccctggagctgcctccctgcatcttagcaagcctcagaaggcacagggcattttgatgctgtggcactttgccatttgaatttgaggagatttgtcttggcttggaaaacaaagcattcaacttgtagcaaactaaaagaaaaaggaagagaagttgagaacaaacactccatccaggagtttgggctttgagatggggatggggatgggacggagggaggtggaaaggaagtaagggatgcactacgtcattatcgtcagcatcatcattctatccttayttcatccagtctaagaagactatggttgtaggatgcatccttatttgcgagaaattgaaatatggaaatgtgcgcctgagagttgtggcagccaatgcactcagtgctttccgctcatgtcctcctcttaataactttatcaggcaggttctctcattatttccatcttattggtgagcaaactgagatgcagggggttaagaagcttgcagaagatcactctgctggccagtggaggggccaggatttgaggcaggaattctaacacccttagagcctacccttggctacagtgctctgctcctgagcaatgaaatcagcgttggggtagtcatgtgtgtgtgcgtgtgtttgtgcttgaagactttgatgtcagcattttgaccagatgtgtcagacagatatgttgcccctgccccatcacctttactgagttacttaaaccccaggcccctgttttcatgttattatctttactaagggatgcaactggagtttaagttctttctgtgcatttcacgtcccctctgcacgcccttctcatggggccaatcactgttgggaacactcagagataataaacatttccctgctgtatcatcctagaggatctgtcatttattaactgtgtaccgttggcaagaacctctctgcacttgtttcctcatctgtatgatagaaataatacatctcgggatggtagtgaggaagggagggttatataaaatgacttcyactgaagtgcctgcctggcattcagcattgtatagagccggaactccaaatgtcttctgcttgtacctgttttccttctccccaagtcacccagctcacaggtggccgcaagctctgaactggaactgtttctaacacatctggctgcttcccctagagacagacatgcaaatagcttcatatcctcttgtagctgtaaccatttgcagacaccttattgtcttacagctttttaatttgcctgcacamatagacctgcctggccaacttggagggaattttaatatctaagtgcggccacatacatatgtgttgtatactggggccatgccttcctgcttatcaaggcaacagaaatcttgtacatggttttcttactttctggataaagatgggaccttgtctctccattttgtcataacacttttttatctttactttaagatgaaaccctccttaaaattgtgagtgtttccctggatttccctggggagaaaccactacagtggctttgattctttttcccctccttgggatcattctgatcccattccatatctttggagggtctatggaatggggctcagctttgcatcttggattcacaagaagggaagcagggagtgagggagattgggggaccgtgggcgtgtttcatcagatgcagctccaatggccttttccctctgaccatatttcaacaaccacacttgacacacagcctagcytcccycaaagctcacgtgtgcaccctctgcccctgtctggggcctcccctattcattttcagatcgattctgacacctgcttttatctcccttaccccttcagcacttcttgatggcagcaacttaagttatacttaagcatcctatattcctaaaatatgcagaaattaaacaaatgccttgtgctctcagttttcaaagatctctctcttttttttgagatggagtctcactctgtcgcccaggctggagtgtagtggcgagatctcagctcactgcaacctctgcctcctgggttcaagcaagtctcctgcctcagccttctgagtagctgggattacaggcacctgccaccacacccagctaatttttgtatttttagtagagatggggtttcaccatgttaaccgggctggtcccaaactcccgacctcaagtgatccgccctcctcggcctcccaaagtgctgggattacaggcgtgagccaccgcaccccgtccaaagatcccttgagtaaaaatattcacatcagtggctgcagatagataattgtttggtttttgttggggaaattccaactctttgtttagaacttgcctgattttcagtagcatctctaacacttagagttgatttggatctggcattatgttgagtcatcatttttagtgggaagaatactatacaatgtgaaagaaagtgtaaaaagtactctattttaacaaagttgttttctttctctttcttcttttttttttttttttcacagcgtcttactctgtcacccaggstggagtgcagtggtagaatctacgctcactgcaacctctgcctcccgggttcaagcgcttcttatgcctcagcctccccagtagctgggactacgggtatatgccaccatgcctggctaatttttgtatttttagtagagatggggttttaccacgttagccagactggtcttgaactcctgacctcaggtgatcccccttcctcagcctcccaaagtgctgggattacaggcgtgagccaccatgccctgcctgttttcactttcatatgctgtcttttatatgtgtatgwgtgtttacacaaccaaggtcccgaccyacataatattttgaattctgttgctttaacttaaagcagcggtttaagtggttaatttaacttaaactccattttcatgtcttcatgttattttaataacagtagcattttttgattggtccaagattataggaataatttcataaatgatagttcatatcctagagtgtttccaatttttggccactagaagggaaattctatagcaaacatctttgcgcgtccatcttttagtttctgttgaattaatccctcggtgtaatttcccaagagggaaattgctggatttgaaggrtgtaaacatcatcatggctccagtaatgcwgtgcacgtggggagatttttaaaatcagtgttctctcygttggcatcttgtgccagaaaaatgtcagaagaaaataatgcgaatgaacaattaaaaagctaatcccctctttaactcttaaaaatatggaaatgaaataggggttttggtccatggatgctgcctgggaagccccagctctgttactgcaggcatgcctttccttgggggagagatcgtctttccagctatctttgcttctggagaaaagatgctcacagtacttgttcaacagccgcacttcagcctcctgcacttgcctcrtactcaccttcagcaatgccaaagcgcttaggcctccagcatacatcatcaacgccttctgtctgttaactgtgcaacagctyctctctgatttgtgaaataattgtgtgtccactgattaatgtgtatgttttaaaacagtgagattttgggttggaatagaagagggttttgagatactctcaaataattagaaagacaagggagtggacaattaraaatgggaactaattatggcttattgagcacttaccttgggccaggccctgctygaaacacgtgacatggatgaacttattcagtccccacaacaactctactaggtaggcaaattgttctccccattttataggtgagataactgaggccaagagattgagtatattgtcaaggacacacaagatgggaacccatgtgtatcagtttgctagggctgccatgacaaattcccacacactgggtggctttaaaccacagaaatttgttctcccayggttctaaagggagaccagaggtccaaaatcaaggtgtcagcagggccgtgttccctctgaaggccctagggaagaatccctccttgcstcttcctggcttctggtggctcccagcaatcctaggcatgtcctggcctgtagctgcatcacttgaatctctgcctctgtcttccatggccctcttccctgtgtgtgtctctgtgggtcccctcctcttctcataaggacactagtctgacctcacttaatttaactcattatatctgcaaagactctatttccggaggtcaccttctgaggttcccagtggatatgtatttggaagggacactgtgcaatccactatatcacggtcatagcacrtcacagtggattgtacactgcaatccayggttgcaggtccctagtggatawgaatttkggagggacactgtgcagtccactgtaccatggtcatagccaggacctgttcctgccttctaggacaagagtggagaaaagggaaagaaagcagaagcctgggtrggctcagggtttgcccaggtgctcttgagatggacaaagaatgggcgaaaatcccttgggcttttaaaaggttgtgtggccgggagggactggagccctgggcgagatgcctgcctgagtgaggtggggttgcygggcacagtcagactgtgtgaagactgtgtgagtgtgagattatcctgggcagaactaaacagctttctggactcaaggsgaggaggcaggtttggagttaatgccccgccatgcttgagtagcttaaataaagrttacctggactatttcctttctccagcagctacgttactctgtctctgaagccatgggggaaccccagaggcagacatcagygtgtccaggttgtaaaatcagacttggagckccaggcagggaagaaagcacttcggcatgttttctgcctcactgcaaaataaatgtataagcattccagggaaactgcagggagaggggaacattcttcagcaggyraggaaggataaatgcaaagtaaacgtataaggcttatrattactcatttgaagtgtgtaaaatgtaattaatatgatctgtgttgcagtgctgtctctcttgttttatttaagtgaacataaaatgtaatttatgaggacttccccaggttaactgccaatatcaattccttgaactgcgttttttccacagcgtcttaagtttctcagcaataaagttcttctactactgtgggggttttcagggacaatttatgctgaggtttggggtaggggctggttctcctttaccccagacactcacaccctccgccccttaggccagcctgaagatgccaattcctatcagttatcttctctgttaatgtgaggtctttttcatgtcactgtgatgacagtggtatacagaaaaggcttctaataaaattaaactcacaaatctaggaagctacctttaaatttcgaatcttactcttctattcataagccttcaacagatacatttagggtggcctttaattaatatttggtcctttaacacacttaatcttctgataacaatttaaattgcatctaaaatgtcatctatttacagttatttttgaatacttcatttgcccaattaatgaacaagcatttatttattcatttgtttatttattttgagatagggtctcaagcggttgcccagactagagtgcagtggcaggatcatggctcactgcagcctcaacctcctgggctcaagctgtcctcccacttcagcctccccagtggctgggactacaggcgtgcaccaccacaccttggtggtgtttgtattttttgtagagatggggttttgtcctgttgcccaggcaggtctcgaacacctgggctcaagcaatccacccgccttagccttccaaagtgctgggattacatgtgttcaccatcctgcccggctcaagtatttacataatagaaatctaatgcctcaaacttagaaatatggtgaatcttaagatttatttatttatttatttatttatttatttatttattgtttcagactcttcaattcgytagagattaagtttgttttttgttttttgttttttttttttgagatggagtctcactctgtcrcccgggctggaggagattaggttttttaaaatgctctagtattatatataaacttagatttcagcttaaaatttcaaatcaaataaattgttcaattaagtctttcatattgtattgcaatgtagatctattcaaagaggccaaaatcttgaaaatattaatattatgggttgattcttaaacatctctatacttattttaaaaacagttttattgaaatactatttacatgtaaaattcacccactttaagtgtagaattcaatgaattttagcatatttatagagccgtacagcatccccgcagtctaattttagaacatttccatcaccctagaaagaaactctgtgtctatttattgtcayttgccatccccacccctggccttaggcaattgctggtctactttctgtgtctatgtacttaccagttctggacattttttgcacttcatttgcaatcatcctaggtttttaagaaaacaattttggcatctcaaacaatattggggtcaccttctcaagccacttttcgggttacagcctcagaaggctgaagctgctttcttcagarctgagctctgctctgagtgggttcctgyagcctatgacccagacttgagtcacagactggctcattccaatgtcttgccgccaaagaccagacccacccaggtggcttccttatgtcttgattccttccttgcctgcctcgggctcacaaacagctttaagacttagttaagtgagagctgactgaagtccatcccggygatgtttgacctaaggtcactgttctaaagttctgtacrtgacagccatgctccattgcccacctgccatccttacagcaccaacttggaggccaccagccaacctgctcaccagcagcctctgggctccgcctcagggtgttgctccacgtcccagcaaaacagcttaaaaagcaaaaccgcagccaggagttgcatagatacctgaacacccgtgttcatagcagcatgagtcacggtggccagaaggtggaagcaaccctaatgcccatcagtggatgaatgratagtggtatgtatgatgggatattattcagaataataatatgtcagaataacgaaattctcatacatcctacagcrtggatggacttagaaaacattacrctaagtgaaaaaagccagacacaaaaggacagacactgtatgatcctacttgtatgaagtacttagaatattctaattcagctgggtttggtggctcacatctgtaattccagcactttgggaggccgagrtgggtggattgcttgagtccaggaattcaaggcaagcctgggcaacatggcgaaacccatctctataaaaaaaattcaaaaattagtcaatgatggtggcctgtgtctgtagtcccagctactctgaaggttgaggtgggaggattgcttgagactggaaggcagaggttgcagtgagccaagattgtaccactgcactccagcctgagtgacacagcaagatcttgtctcaaaaaaaaaaaaaaaaaaattcaaattcatagagacaggaaatagaatgggggttaccagggacaagagagacgggaatggggagttgttatttaataagtacaaagtgatgtatagttggtgatagttgcacaagaatgtgaatgtacttaatgccactgacctggacacctgaaagtggtcaaaatggtaaattttatgttatgtgtattttatcacaataacaaaaaagcaaaactgcagttgtattatttcttgccttgaagaacttattcaagggttctggtttgactacagaatcaaatgaatgctttttcggtttggcctcaaatccttttctgggatgacttaaagttcccagcactttgggaggctgaggcaggcggatcacctgaggtcaggagttcaagaccagygtggtcaacatggtgaaaccccgtctctacgaaaatacaaaaattagctgggcgtggtggcacatgcctgtaatcccagctactcgggaggctgaggcaggagaattgcttgaatccgggaggaggaggctgcagtgagccaagatggcgccactgcactccagcctgggcaacaaagcgagactctgtctcaaaattarataaataaataaataaataaatgaagatgcctmaccctagctggcccgtcccttggctattaggtgccgcatgacccttgtaagtacctacacccaggcccctggcctcgttggccycatctggcacagtttctccccctcctcttctccagatggcctgcacgtgcgctgtctatgtgcgcacctgttcctcatgtctagctgatccagcatccccagactcttccaagatacaaatcccctggggtgctcatcaagcttgaagcttcccaggcccctttgtaggagaatctgattcagaagggctgggaatatatgttttttaaataagtacctcggatgactcttatcaggaaagtttagaagaccttggactggggtgactgtatttcaaaacggtttagtttcctgtcttttgggaaaggcacttccattcattcatttattcattcagccctgaatttaggccccttttaggaaccgaggatattgtgatagacaagacagtccaagtccttttgctcatgaaacttagggtctyrtggtggcaacagacaacagccaataaagcatttaagataaaaagacaggagagaatcaatgccttgaagaagcatatggcaggcggggcgcagtggctcatgcctgtaatcccagcactttgggagactraggcgggcagatcacttgaagccaggagttcaagaccagcctgkccaacatggtgaaaccctgtgtacttaaaaatgccaaaaattagctggacatggtggcacacgcctgtaatcccagctacttgggaggctgaggcacaagaattgctcgaacatgggaggtgggggttgcagtgagccaatatcgcaccactttactccrgcctgggtgagagaacgagaccctgtcttaaaaaaaaaaaagaatatagcaaagaatgggaggaacaggagagagaggaagtgaggccatgggagacagtgtgtccagggaagctctctctggggacctgatgatgcggtcagagggcagagtaaagaagagaacagttgttggtgttgggagagggactccaggctgacagagcagtgagtgcaaaggccctgaggctcatgcttggttttttggagaaagagcaagatgaccagtatggtgraggaggggcagaggcaggcggggctatatcatggggggcctctgggccgtggaaagactttggattttgttctaagatggtggcaggtctttggagcaggaaggctgttatgatctgatttacgtttctagaagattattctggccgctggtagagaatagagtagggaggccagggtggcagcagggataccagttaagaggtttttgtcatagcccaaggggaaggcgatgatggcttgtaccagggcggtgaggacagagacatgctgatgggtggggcatagcagacagaaaagggaatttaagaaaattcctcactgtttggtcacagctaggggcatgrtggtggcatccactgtgatggtgaacattgtgggagggaaattttagctgtggaagccatgagttctctttatcaatgtttaacatattccattcataagcaccctcaaattgaacttaaaggaagagtcaagtcaaggccagaggtcccacagcagggctggaaagcacacctgtgggacttctggccttgacttgactctttccagatatctgagtcagacgttttcaaagcatgcaccatgacccacgggtgtgttgtaaaatggatttaatgagttgtgactagtagttcataaaagaacaatagaaaatgttagtttgtcacacatagtaaggatagtacttttaaaataaaacttgtctyggttttctatatatatttgtatgtaaatcacatgcaaaargagaaagggatgaggccaggaatcaggagatcttcattttagctgcaactcggcctatagccagcagtgtgtccttggacagatcaccttctatcctgcacgtccatttctttacctgcaaaatggggttagggatgaggtggtttaatcttttaatacctggcacctcctcccctcccctcccctcttctcccctcctctcccctcccatctcctctcctcccttccccttctctcccttactctccctttctctcttctcccttcccrtctctcatgctctcagtgggtgggcagcataccccactggccaggaggattatgtttgaggtttgtgtcttaatctgttcagggtgctacaacaaaataccataaactgggtggcttatacacaacagaaatttattcctcacagttctggaggctgggaagtccaagaccaaagcattggcagatttggtgtctggtgaggccctgctttctggttcatagacagtcccttcttgctatgtcctcacatggtggagggggtaagtggtcttttttgggacgtcttttataagggcactaattccatttaagagggctctacccccatgaccaaatcaccttccaaagtccccaccctctaaaatgattatcttgggggttaatattttaacatgaattttagtggggacacaaacatccagattatagcactttgcgtcctgccatttctcttgctcagtcagaatcagttttgaggatactttccctaaccacgtagattcattctctttccttctgtgaaagtcattggactaggtggtctctaaagggccctttttgtcttagatgtgcctgatggtgcactaacctgtcaggttgacaactgatttgtacttggacagggatcttatactttcggaagtaggcatgctgtctgggcatgtttctgcagatgggccagaattctctaaaagagggaatgggttggctgctggggccattggtttgggggactccatttggtgacccagttcttctcctggccggtaaatattttaatgtatacactatattcttcaaagctgagtattagagtccccactggaaggcttccatgtcagtaaatctcacggctcttggatgaagctgcatcttttcccaagctataccaagcacattcacgtaattcttagatttactcccttgaccttcatmtgccaagtttaattcactttagttctacaaccaccttctacaggctgggcgtcgggaggggctcttgctttgaggagctggagtaggagaggccaacacgggaatggctatgatataggttcagattattctcaaatcaaatcaaccccaaatccctcagtattcttcagtgaatttgcttatagggtctccagtaaggagagagagatttgggaatggttttaatggctctgaattgtccctgtgggagggactgggtgagggaaggaatgggaagttggaaaacttaagtttgataatggcatgaatgacaggttaggctgaaccctattttcacctcactgtttcgaggctcctgaaaagtcagttgtgaatacaagcgtgctgaatgttttgtaaagctcctgaargcctgattggtgggaggatatcgggtcaacatttgggactgcctatttgcttggtctctrtcagtcccaaayatctgtaagctgtgacatgtcccatttcccaggagtgggggaaagcatgctggtttgtgggtttgaatcccaactctgacattcactagctatgtcgctgggtcagtccttaacttctttgagcctcagcttccttgtctgtaaaatgggtgtgatacgacctacctcctggctggtggtaagtaatagagagagacagtaatraaggctcatgtttactgggtcttggagagttcatttaaggcacatcacagcascacgacagcatatcatattaatttttctttttgatttaactactttggctaaggtaattaaaccactttgaggaagcattggcactttgagaagaatttttcaggagagaacatgctaactcctcttctttgttcatttgctattagtaagtcatttggtctgataccctttagtagaatatctttggttaagtcctcagatcacttgatctgttgtttttattcatttgacacaaacataccgagtacctgctatgcacggagcacttaggcagtggacaggtagagaggggcaaacctggcaggtgaggggcttggccaggcccaggtgtgatctccagccctgctttgggacctctggccattctgtccccacactgggcccagtattttcctctgcaaatgagcagggtgaccagacgagggctaagaaaccctcagactccaaacatgagtttggattcaaagagctacaggatccttgaaataaaatgaaatctcacagagatagtggttcctgggtatttttaaatctcggagtggattagcttcagatgtagttttcgggaggacttattggcttctgtttacctctcatatttatgagaacggtttaggattgaaccawgtctaagccaaactgtgatgtagaaggcttcgggcttctgtactctccctcctcttctcccccatccccgcttttattttgctttttcttctctttcctccagttctggtattccttccagaaatcaacttaaacaatgcacttgggttctaagtttcttcttttgcatttaaaaggagagtagggcttgacgtggtggctcacgcctgtaatcccagcactctgggagaccaaggtgggaggattgcttgaatgcaggagttcaagaccagcctgggcaacatggcaaaactgtttctacaaaaaaattgcaaaaattatctgggcatggtggcatatgtctgtagtcccaggcactggggaggctgaggtgggaggatcggttgagcctgggaggtagaggttgagattgggccactgccctccagcctggatgacagagcgagacactgtctcaaaaacataaaaaataaaataaagtaaaaataaaaggagagtgttggcagtgctgaactcaacataatgttagtcattgctaaggagagcttcaaggtgcctctgttagaggtcagattcttcccactctgagatcccctaactctgattccctcctgggagagcttcaggttgcagctgggttaccgagacaaggagtttgtcctaaaagctacccctgtggcccatgccccactgagctacagactaccagctctgcttctatataaggttttttttggaggggatgtcactatttttgtgttattattagaaaatgataaaaacctcaccaccaggggttttaaaaccctggtggattgtaaccaggtagagattgttctcacagctaggtgttgcttttccattccctgcctctcctggcctcagattctttcctcctacaccaattactgtttcactgctccccacccaccacrccttccaccttgactccccaaacctgagcaattctagggcttgtttaacccatggttctacagggagatgccccaccgccctgtgtttggaagttaggaatttagagttggaagggacttagcgatcacctggttgaacctcttcacctgacgaaggagaaaacgaggcccagggagaccttgttcaaagtgaagatcttagtttggtggcagagccagggctgggatccagctctgtggctttccacatggacagtttttgagtgccatggaccaggctagttgagtgccatggaccaggtgccatttcattcccactaccaccttataatacaggcattattaactgcattgcatagttgagtttcagagattaggaagttgacccaaggtcccaagcctagttaatgggtaaaactaggacttgaatccaattctggttgaagcttctccttccaaakggtgttgctgggtgagcaactcatcttggtttgcctggaacttacttggttttagcactcaaagtcctgaatcctggggatctccttggaccaggcaaactagactggttggtcactctagtttcatcacagtgacctcagaagaggatgaggragagctgggagatttaatgtcctttgagggctgactttgggtcccccaggtacaaaacagaattgcctgtytttgcaggagcagctccttctgaaggagctgggtattgctcactcctctaacttgatgaggttgaatcagacactgttctgtcttgacagatgggctgggccacactgctagggttccagcatgaatttgtgcatttggaaaaaacgtttctgcaactgcattgctgctctgcactctcagagtgtggagcagatgaatcatgcccagcctgttagcaagtccggagatttggaaagtgtccgaagtcaaccgagtattagagttgttttgccagcrgaaggagcagagacccatctggacttgggtgatttagtacagcagtgcttcatttcgaaatgttgagggaagtgacagtccaaaaatggtaggagttgtaagggtaaaagcgtcttttactgcctttcgagacagcacggtgaagagcaccagtgctggaaataaacagacgtgggttgtcaatttgctacttgcccttgctgcttgctgactgtgtgatcttggacaagttacttaacctctctgggcttcagttttctcaagtgcaaagtgggactagatgatatcattattacatctaacttaaagkgtttttttatgaggattcaatgaaacaatgtgagaaaaaggctgagcattgtgtcaggcatcagatacatggtacattctcgctacgtggtagtttattttgtgagatatgacttccgtccctggttctgctgctagctacactgggcagttcaggcaagcatgtaaggtctccgagtttcttctgtaaatcgaggggattggcctatactcgaatcccttggaattctgaatgtctttggttttaggacatgcgtgagaggcaagttcctactcagggtcccacagtatttcagttctatgtcttcagacctgaattaacaatccagcatctcccctgcattccagcagcactgagaggggtcacagggagtcgcccagagaaccaggtgggcttcattcctttgtcctgagccagctctccgtgggctgctctcagttagcagactgggaatggagtgtccacttgaaaacaacgtgctcttcattacaatgaaacaaacacgagcggcttgagtttaattttagcttcatttatgtatcgtgggagatatagaactgttcctgggtccaagaaatcatactgtaaattgagctaattagattctttaaaaaaaaatctttaatcccattgatttgagtttagagaggagaaaacaagtgttgtggctaaataaaactcccagtgggcggggtggacagcagaagcctgccgttaaatgtcctcagggcctcagggatttcttttgcggggcttttgatcatcagacctttcatttttcaaaggaaaaaaaaataaycatagcctaatgctactggcagttttctccttatatagcaagaaccaaacctctctgatgctcttaaaggaagtgttaaatcttctatcattcataaaccttttgagtacctactacgtgccaagcaccacagcaacaaatgaataggttagagagaggctctatccccaaacccagtgcctggcgagttgccctgcacatcgtaggtgcttgataaaaacttgtcgaatgaatgagtgtaatgaaaccattaattaatagtttgccatcacagcattttgatgaatcctgttgtgttttggacttgtcctggaagtggccagccaaccaggtctcaggccaggaggagactagggagatgtttgacttacctgtcagtgaagaggtgacccagtgtggcagctgagaccatgggctgtctaaggcagaattctgtctccacctctttctagtcatgagacctgggcaagttacctaaccctgccatgcctcagtattctcatcagtaaagtgagaatggtagtagtacccgcaccatgggactgttgtggggattaaatatgtgaactgcttggcgaagcattggtgccctctaaaagttagctgccaccrtctgggccttggttactcaaacttccctaaygccacttgtaagatacatgtgaggtgaatatactcatgtgcataattgctggtccttcctttgcatcccaggcaacagagtaggtcctcattgttaccatttacatatgactagcccagaagtcatttgtggcccctggaaaccaaaagcccccagtggtctaaacctgagagggtacagtggagctcagcttctagggagggtccgaaccttcgcacagcatcagcagtaggagatgttctacagctcttattgtagatgctacagtgtctyctgaggtagatggagccaggttgtgtggaawttgtttattctgtaattggatgctcaagaatcagaaagcataaagagtataatttgtgtctctcttccccatggtggggaagtcttattaaaatgcagattcctgggccttaacttccatctccccctccttctgattcaacaactctgggatgaagcccaagaatgtgcccagaaatctgcttttttaacaagcaatatcatggggaaagtgagtagggcacacgttgagaaactctagtttttggaacatgacacggaggatttggggaactttatcttttcttgactctccttctcatccttccacagatcactgggcccctcctgagtcgtctggctccttctttcctcttggggagagataaagtgctggcccaagcctcccaccctggtgggyggggtgggccttgactcagtggtctgtatcctcgtggccagctggcctagctgagttgggaggtgaccctcacctcacaggttgggcagcacctgtcagtctcgaggctcagcttggctcctttccactcacatgaccttgaccatggccaagtgcctgcagctaagggaggcgcggaggggttatctgtaaaatgcaggtacttcctttaccgtgggaaggatcacactgcaccgactgcctgttgcatagcgagcactccagaaacggtggggttgttatcattcccataaaaggcacacaaggcccctttagcttttgtggtctggggagccaaggccggttcccatggcacccagtgaagtcacgggcagggctgatggctgtgggcaaagaacccaaggttcaggccccacacggtcaaagcattttaaaggccttgtattagacaaataaaccaattaaataatactgccccccataaaagcagacttttaatggattccatggtaggcttttcaccgcgcggtcccggagccatgggcctcgatgagcccgtctgccgccatagggagaatttaatcttgcccggcatgggcataattttacgagttttatggctgtttttacttctccgaagtgttgctatgtcattgtgcaccaagggcaacttgcgtgcatttcacagtttacctcctttttggtggaaatgaaaaatgaagtcataaattaaagaaaaacacaacatagaatttttttccgtcttcttggggcaactggaggaacaaagaaccagtgtttctctgtacagcctgatcaaattctaatggctttaatgtattgacatttgcctgcgattccctcctccccagggaagactgtgggcatgtagctatgtttggagcttgtactactgaccccgagaagacctggggcagttctctagggcaagggttggcaaactctagcccaagggccaaatctggcccactgcccatttttgttcattggtggaaaaaactcaaaagaagaataatattttctgacacatgaaaattagatgacattttcccagatttccctgttcatcagtgaagttttgttggcacccagccacacccattcatttctgtatcgtttggggaggatttcacaccacagtggccctgcggaagagttatgacagagactgcagggtgcaaagcctaaatactgtttggccccttacagaaaattttgctgacccctgccctaggaagtcaaggaaaaggaaagagaaaacatggcatcttgtttctgggcattgatgattgactttcagagtttccacgtggctcaaagtgacaagtcaacggaggctcacctgagcagtagtttttcctccggagaccttccagatgtcatcagctgcttttggatgactctcctccctttcctgacctcagattgacttctaagcagaggtccctgggctaaccccctgcagccagccctcccagtcatttgagctgcaccctgcttgaggtctggtcactcctcatcagtccccttgatagccacaaatagagaagttcccgccttcctcccagggggatctaaaatagcttctgaaatttgtcaccaacacttttaaactgtggcttttggccaggcacagttttaagcattctgcacatagtagttactcatttaatcttcacatccaacccaggaagttagatgcccctgtcattcccattttacagacaaagaagcagagacacagagaggttaggtagtttccttaaggtcacacagctggtagtggtagagccagtattgaaacccaggctatctgttccagggaatgtcctgctgtccattcattgcctctgtggagcaggtgaattctttaggctcatgaaaggatctagttttccttgttccactcatgccactgttgcacctcaaaccataagaaaactgcctcgtacttgagaagaaagccccatttattcttcccccatctctcttttttccctctctccttctttcctttcttccttccctcccttcttccctccttcctccttctcggcttccttttttcctttcctccttcctttcctccctcttttcctctctccttcttcccttcccttycttccttcgcttgctcccctccctttccttctcctttcctccttccctccttccttctctccctctctactgctctctttccttccctcctaccttccttttttccttccttccttccctctctcccaatttcatccctcccttcctccttcctcctccctccaacaaataatgatcaagcccatgactatgcgttacataatgcatgaggggctgcacagagtgaacaagaaaaatgaaaaagaaagaattcattgccatttaaaaagagctcttggtggcttcaatgttggtggggtttgaggagttcacttattccccctcttttattaattgtaagtaccatctctgtctggaatcataaactcttgtcttttctgcttcatgctgatattttcactaaaagtaacataatttaggagaggttttggggaggctgggcctctgacctgtccagtgggaggagcctcctggggaaggacctgcccattctcagaagcccagctttcagggacaaggaatgaaaggtcattgactgttgctggagaagtctgcggaatcttaaaatgtgttaccaagcctgctgctgggtagaacttgctgtcttgaagcagccattacgccatcttttgtaagtggtttcatttcaatgagctttagatgcctgtcctgttttcttaaaacacttgctggggagactttytagcatgatctagatccttctgggtgtggagatgcctgaatgttgggaagacagacagcagctgtgctgttggagaagggacagtgtggaaatcttcctttgctagaagctggttttctctttctttcctgcctgtttcttcttccctactctgtgcctttttctttgacagacaacaaatctttgttgctcatttctgatgagccttcactttctttcctcagtcatgcggaggaatccctttggtgtggacatctgctgccggaaggggtcccgaagccccctgcaggaactctacaacccaatccaggtaagcttcaagcactctgtcagcatgtgaattttttttttttgtaggtatggatactaaaaactctaaaattgtggtctttgggggatttaaaacttcctttcacagcctggcattttaccttcagtggttgctttctccgtcaccctttttctatgtagcatctctgaaaaatctagcaggggatgtttagaattagagaaatgcctaggtttagtgctaagcattcagacctgcccagggtttgaactcctgagattaacagtctcaagttcgagcaatgggactcgggaattaaaggtccaccgaagctgtgcagtcttccctttggtatccccaaaggaagagttgcacatgggtacacttgacacccattcccacatcccacatattaaagcccagtgatgccccacctcactgtgccagtttggcaaactcccttgcgagcggggaccttttgctaagtgactgcctcagtaaatctaactcgttagtttaatgaggcagcaaacgtggcctctgtgccatcaattatgaaaagagctcctctttgagcaaaagaaaagctccaaccaaggaaaagtgtcttctgtggaaagctagtgcaaagttaggaggcctggttgccatggcaacagcctcagtggtgtgtgtgggtcttgatgtggagactctggggctgatccttttgtaggaacattaattagcacttgatgcccagaactggtaagtgaacaactagcagcagcatcagtggaccttcgatagccgtagagaaagagggaaaaatgtactgctttggctacagtctctgactaaatttaatacttctttggaccaaggtacctggtggaggaagataatgcacgggcctcaaaggtgtcgaatttttagaactcttgtaaagggatgcacttgagaactatctgatgccccctaccccccttcccaatctctcacctgcactcccttctggaaaaatggactcctgaatttatgcatcatgggtggcctaattaggttaactcatgccctgtcttgaggtgtgacttggccagattagcccattaattgccaagtcagtattgcctgaggcttcctgtactgggttcggtggtgactcagtggggaatttgatagttgggttccctttggtgcccaaaaaatctccatattataggcaggtctcccagcctgtccacacacaccctgtcctaaggaagaggcagaactgtgcttcaacaaaggataggatttctggtaacccgtgtcaaaaacaacacaggctcctcagatgcaaaccattcccttctttttgttgatatcctctgttctcagatgattttctccttcaaaacaaaactactgaaacactgctgcaaattttatgggtaacatatggtgtcatgggaaaagctatatctgaagtcaccgcccctgtggatggaaggtccatggactgcgtctgtcctgttcactgttggctcctcagtacctaacacagggctctcaaatacttgtgattcaaaacatgaaagtccaggttcaaatcccggcttcatctctaactagttgtgcaaccctgaatatatgatgagttatctttaggggtcagttttcctacctaaaactctccctggaatgttgggaggatgaaataattctgatgtgtcaggggctctgtcagtatgatttgtcatttttgtggtcaggagggtggcttccatatcagaagccttgacttaggagtcagacctgggttcaaagcctagtttcatcatttcttagctatgtgactatggggtgtttacttaacctctctgagatttctttccttgatttataatgtggcatgarcaatacctgccttgcagtgttgcatgtggtgatgtgtcttgcttggagcttcctgtggagtttgctccttcatgggttcattcactcctttttttcattcatttcttcatgtgctgttacatgtacctaggaacatatagcttagtagcttagcagcttagcactaggcgctgggcacaaaagggtggagagggtgtgtgcttagccttttgtggctggtaactctgggcccagagttgaggggaatgatttgactggcgaggcagactctgcttggtcccattgtaaaccagtcatagaagagatgcctgtcctgggtaggggccctctcttccttccggtagtgttctgagcattgtctggatgacaggcctattgagcagtagcctgggacttgggagggaaactagggctggagagcagctctgggaggcattggggagggcgtaggtggatgagtcaccatcctccctcaaggacgtcttgggcaagttgtctggccccattagccagcaaccagggaaatgtagctgcaggaaaatcacctcgtttcctcgggatgttttttcttaggctggtttcctttacaagctgcaattatgttccatcccacgcaagttcagtaagtggcacttttcagagaaactgtcttggtgatcatttgggctgctgtgggccagggagttgaggagagaagggagtgagagcttctactgagtttagttggttttgtgtccatgagccatttacaaactttgcacctgattgggctcagttgcagtttcttgtatttccctaccagccaagctgttgaagctgctgagcccggaatgatgttatcactgaggcagatgacaaaccctctagttgctagaaaccaaactgctccccgagctggtgtttccgttttttgtactgactgcttatttgggcttgatatataatggtgaaaacaggaactgtttattttaggtgataagaaaccaacattatgacaagaagatgtcatcttagttactctgttaccagtaccataggccagatactatctagatgcttataaacatcttatctaatccttgtaataataagccccaagctaggttttatatccccattttatggatgggggaactgaggccaataacttcatataacttatccaaggccacaaaactagtaataaacagagtgaaattcaacccaaaaacaaactacaaatccaaatttctttacctctatgctgtctgtacttgctgttactagcaaagttctcttggtgggagttaccccatcccctctccaaaaaaaaaaaaaaaaaaaaaatcaaacccagattttcactggacaaagggttgggaaaattgggaaattttggctataatctgggaaaactggctataatatggggaaattggctataatctgatttgagtgtacagagttttttattttagtgtccaagatttcttattttagtgccttgcaaacccctaaccaataaaacaacaacggggtcaggagatcgagaccatcctggctaacacggcgaaaccccgcctccactaaaaatacaaaaaattctatgggcgtggtggcgggcgcctacagtcccagcttctccggaggctgaggcaggagaatggcgtgagcccgggaggcggagcttgcagtgggcggagattgcgccactgcagtccagcctgggcgaaagagccagactccgtctcaaaaaaataaaaaataaaaaaaaaagtttggagttgatattcttagaaaaactgtactctgatgtcttataattttcctggttctctgctgtttccttggccccaaaataaaatgtaattgccgatcagatcagctggaatcaagtcaccgaaagttcaggaggtgtcaactgcatatttgtgggccgagcacatctgcgggccgctctggctcagttcagaggcacagggcagagctgcattgtcagccattaatagggcctaatttcccctaaatgccagctagggcgagacagcttgtccttctgccccgcccacctcctggtcctctcgtgggttccctgaaatcttcacaacatcatcatgtggttcagccctgccctgcttggttctttctttagcatttacacttgctctgtgattactatgttgcaaggggagagactcacagcacagggctgtccgtgaatttataagcgctgagtctaggaggtttgcatagggcacagcagatccaattgttctaggggtctctgaggaccaaacagtgtccaagggatttagaggaattctggggaactctctggggcggggggcgggggggggaatggctccaggaaaactgagaatgacaagatcttggaggcccccactgaaatctctgttacatggtggcgcctcattggtcaagtcttcagggtgctaaagtaaacttacttctccatcagttagactccaggaagcaggatgaggaggaggatgaggagggagaaggaaggtcggaaggaaagaaggatgagagagaaaaaggaagacaaattactatttactaaatgtataatacatgccagtgaccattctacatatttttcacacgtctcatggaatctttacaacaacccgaagaggaaggtctccagtaaccccgttttttagttaagttaactgaggctcagagggttgagcaatgtgccaatcacacagctcctaaatgggagagccaggcctatgaagcctggctaggttgcaggatgaggagaggctggtgctttatttttcccgggtgaaaacatgcttccttgagattctctttcccagtgactcaagcgagacctgaggtatgctcaggaccagttgcaaaattcacaaaagcaggggccaggacttctggaatggcatggaatggacaatagctgtaaacaattacaggctgggcacagtggctcacgcctgtaatccaacactttgggaggctgaggtgggcagatcacctgagatcaggagttctaaaccagcctgggcaacatagtgaaatgtcgtctctaccaaaaatacaaaaattcgcccggcatggtggctcgtgcctgtaatctcagctactcgggaggctgaggcaggaaaacctgggaggcggaggttgcagtgagccaagatcatgcccctacactccagcctgggtgatagagtgagactctgtctcaaaaaataaaaataaataaataaataaatatataaataaaaattgcagatttattttttgcttagtgaacctgatagatagcccagtgaaggacaggcctttgactcctggctggagctgtcagagaaggagtcacccctgagaattctgccgtgggatagagcatcgcatcttggtgacatttggaagctgggctcattgatttcattgaatgttttagattgataaaagcttgtaatagtccaaaggttgttggggcagttgcgggggactctcttagccccaacctaaatagctttttcagcaatgcttgacaaaatgtgttccttctatggacacttgtagaataaacagaggaaaagggcgtggggaggagaggcacctaggtcatgtaacctgataagcggtatataatagaagctttttgcaaagttatgagagaatcaggagtgagtggttagcctctgaggggcggtgcgcagtgggggcctttatacaggatttgagtccggtctctgaagacacagcacacttccccatgttaaagaagagagacagcatcacagaacggggaacatcagcgaggccacagggagacagtccatggcgcattcagagaactgtgaggggtttgtggctggagtgaaggtgatgccaggggcggatcggagagggggcaggagtggcaggttggtagcatgtggatcaggtcatgtctgccattctggtcatttccaatccatctggtttttacctattggcagggttggaggtcacgaggagcccacaaaaactggcgtgcatcttataacctagcttctcctttggccgcttgctaactgtggggcttctccagggcaggtaatgtccccttccaggcctcagcattgtcatctataaaatgaaggggttagactggatcagtgtttatcaagcctgtggtcttcatattaggaccactctgggagcttttgggaaatgaccagtgcgcaggcctcactgctggcgattctgattttattggtctgggttagggctggggtgttgatatttttcaaagctccctaagtgattctaatgggtagccagggttcagaagccctgagttgaagggtctttaagcaccccctactccctggtactaaaagcctttgattctaagatgacctataacttgcgaatttagggagagagaagcaggctggcaggaccaagggaaaacaaaaagagaaagcagataagctatgtatctgcctttcttcacattccaggacacatagtcctcctgtgcaaataactccccatcttcctgcacccacctatcaccagaccctcggctgatagaaaaatgcaagttagttcactaaaaccttggcactatcagtcctgcacaaagccctcttgagcacacggcacaagcaccatcctataaaatccccagcaagcctttgtctacttgcagtcagttcctctcttgctgacctgcccattgctcccttgcaatgtgttttcatactttttctaataaatctgcctttctttacctacaattcccttggtaaactctttttaccacccacatgacaccaaccccagagagtcacaatgcaggacataacccattatgtgaaaagcaactcaaagcatacatgctgaggttgttcactctacgtagtttctactgtctttctatatgaaggctctgtgtctgtgttttccactaggacacagagatcattgtccctcatctactccatttggaggtttgtgggttcgatgcctatagtgctagacatccagccagtagcatgtgggccaatccgagatgccaagtcttcagccaaagtattgggaggagccctgtgaaagggacccttgagccacttctgtcttgagccagtaagaaggaaaactcagacttgctccaggccaggcgtcagatggacatttctgaaggatcagttacaatcatagaaatgagcatggaatgagaagggccctctgccttttgaatgctattcaggaagaacgatgctgagtggtcacatatgctggggaaggcatgaaagagcagactttgtactgtccccaactctggtcaattaatcccttatttaccaaccacctggtaaatgacgagttcgtctaattatcttctttgactcagcatctgtctaccagccaaagagggattaattgatttggttgtagaccgactccttatgcaaagataatgcttactgccagcctggcagctggctggcaaagatgaaatattacattaacctgatcttacacacagtacttgggagaatgcttcattattaattgcaaattacaatagactagcgaggcccattgcaaaaaaccacggacagtgaactacctctttcactgtggctagtggattcattattcttgaaccagggaagcttcccagtcagatttccagtcaagccaggaaggatttccagtcaagccaggggacatgacagtcaaacacaatttgggtttagaggaaaggattggatgcctgaaggaactggggagtcccagcccagctgtatgacctggggcagtcacttaccctgttcaagccttggttatctgtaaaatcagagcttgataccagtcttgcaggtttgtgagattcagaattctgtatgaaaagcacctaggacagtggcaaggtcagagttggtgttaatcagtagccattcattttctggatggagttaggtaacctgggcattttcttaggggtctgggcccttgctgtgctctgtaatataggctcagacattttgcacatgcacatttggaattttgttgaataataataagatggatgatttcctcttgcctggaagctactagctatcttcattgtgagtacttcctaacaattttgatttatttgtttctagcagagtctgtattgatcagcaagcttgacgcactgatttataaagccatgagtgcctctgtgtgtgtgtgtgtgtgtgtgtgtgtgtgtgtgtgtgtgtgtgtgtgtgtgtctgtggtatgtgttacatatatgttcactcaacctttattctataaaatgtgcagatgcagctttcatattttaaaagtcttctgtgggcatgtctgttatactcccaatgcctagttaggtactctgtaatggtkgctaaataagacctcatctctgggttgtgttcatgtgaaagcattgatctcattgattcgtccacatttaactcaagctttctttataggcagttgttctgcttcagaaacagaggtttcaggatcaagcctaatttgatccaatatattcaaatctggatagtaagctcaatgctctaatggagtttttctgtgtcagtctgtatgaatataatctgacatatttaaactggagaagggcattcaagtgaccaaatgacctcggcagtttccacatggtaacacagcygtacaatctgccattttcagaaagttatttcctgaattaccctcaattataagaggcctccacataatttgatttttctgtaaatgacacaactcaagtagcttctcagccaattggattttaaccttgtcagaatggatagaactgaaacaaagccctggcttgttctgaaactgaccgtaggagagacatcgggggtgagagggtggcggcagcatgcatcttcctttcccagtggagtctgtgggtctgatggaccacgcagatctcgggagagtttccaccccatcttcacactagttactctgagatctgaggcacatggctgaacctttttgagcactggagaccttgtttataaaacaggaataaaatgcttgtggttcagttattaaggattaaattagaaaatatacagaatcccaggcacatggcaagatgcccagtcaatgctgatttttttatttgcatgcaagaaacctcctccaggaagctctgatttttttctttcccctccaagctccggtgaaatgtccttctagaatggtgctgcccactagcaatataatataagtcacatatgtcatttgaaattttttggtagccacattttgaaaaggaaaaagaagacaggtgaaattaagtttaataatatttaaaatttaacccagtgtacctaaaaatgattatttccatatttagtcaataaaaaatgtattagtatattttatgtttgtgttttcatgctaagtctttgaaatctgatgtgtatttgatacctacagcacatctccattgggacaggcagtacatcaagtgctcagtagctgcatgtggcttgtgactgctgtcttggacagtgctggtctgtaaaatgccccgttgtccctgcatcctgcccatgttatgacactaatctcactcatttaaaacgattccaccaggctttgcgccccttgagggaaggagctatgtctttcttattcatcttggggtgtccagtagctactatgggccagccccagaaaaggtacccagtggatgtttgggcagtgaatgaagccatttgttcctgtgcctcatgtgacttcagcatggggaggtgaccagggcttcactcccctagaggtgcagaggcggctggmcatcagggtggacggtttcctgggacccagtgaagagtatggcgcttttgtcccaagtctccgattcatgctgatgcccgatgtttcccccagaagttccttccggaaagcgtaagtgtgagtattgtggaagggctaacactttgaaacatatcagtcattatatcttaactttgatttcataagacgttatgtgactagtgtgcgacaggtgtgaggcagttggagagaataggagcaggggattggttgcctgaaggaactggggaaagcaagtcacgggactaggaagggattagggggctgcttaagcccagaccccaccctctctcgccgcttagcccacactcagccctgtttctcaattccttccgctcctacctcctttcctccttcttctgtagtgtgcggcacgcagcaaatacgcactgcgtgaaatggaactggaattccctcacaccccagcctgcctccctcactgattgcatattcactgtagtagttcgctggggctgctgtaacaacataccacagactgggtggcttagacaatagaaatgtatcatctcacagttttggaggctggaagtcagagatcaaggagccagcaggattggttccttctgagggccgtgaagaagggcctgttccaggcctgtctgttagcttcctggtttgagggtgatctttggcttccttgctctgattgctgccttcatcttcacatggtgctccccctgtgtgggtgcctggctttgtgtccacatttccccttgttataaggacacctgtcatattggagtaggggcccactgactccagtatgacctcatcttagctaattacatctgtaatgaccctatttccaaataaggtcacatttgaaggtgctggggtgagaacttcaacttacagattttggaggggacacaattcaatccctagtgcttactgtgtgtgtcgtgttctgctagatgctacggcttttgagataaaagtccttctgttagcaaagataaaggatcagggttggcagggacatggagaagagggaactcctgtgcactgttggtgggaatgtaaattggtacagccattatggaaaacagtatggaggttctccaagaaattaaaaacagaactaccatatgatccagcaatcccacttctgggtgtatgcccaaaggaagtgcaagcagcatctgaaacagacaccagcactctcactgtagcagagttgcagcattgttcacaacagtaagatacggaatcaggctgggcgcrgtggctcatgcctgtaatcccagcactttgggaggctgaggcagccagattgcttgaggcccaggagtttgagaccagcctgggcaacatggcaaaaccctgtctctacaaaaaatataataaaattagccaggcatggtggcacgtgcctgtagccccaggtacccgagagactgagggaggtcaggttgaggctgcagtaagccatgatcatgccactgctccccagcttggggagaccctgtctcaaaaagaaaaaaaaaagatacagaatcaacttacatgtccatcaatggatgaatggataaagaaaatgtgagtgagatagatagatagatagatatagatatatagatacatataaaaggaatgttatttagccttaaaaaagagggaagttttcagcccttggttacaacatgggtgaacctggggggactgatatggtttggatttgtgtcacccccgtccccaaatctcatgtcgaattgtagtccccagtgttggaggagggacctggtgggaggtgattggatcatggggtggatttcccccttgctgttctcatgatagtgagtgagttytcatgggaattggttgtttgaaagtgtgtagcacctcccccttctctctcttcctcctgctctggccatgtaagatgtgcctgcttccccttcgccttctaccatgattgtaactttcctgaggcctccccagccatgcttcctgtacagcctgtggaaccaatgaaacctcttttctttgtaaattactcagtctcaggtagttctttatagcagtgcaagaatggactaatacagggacagtatgctaagtgaaataagccaggcacagaaagacaaataccgcatgatctcacttatatgtagaatctaaaaaggttgaactggyagaagcagagagcagaatggttaccagaggtggtgaaaacagggagatgttggtcaaggggtacaaagtttcattagatagaatgaataaattctggagatctaatgcacagcttgatgactatggttaataataatatattgtagacttgaaatctgctaggaaagcagatcttaaatgttctgactacacgaaaaatgataactatgtgaggtgatagatgtgttacttagcttgattgtggtcatcaytttcactatctatctctctatctaagcatcatgttgtataccatgaatatatataatttttatttgccaaattaacctcaataagtctggggaagtttgtgctctaattggggtgtcaagccagtaaactgactgaccattataaaatgaggtcctggccagacgcagtggctcatgcctgtaatccctacactttgggagtctgaggtgggaggatgacargagtttgagaccagcctgggccagatggcaagatcctgtctctacaaaaaatttaagaattagctgggcatggtgttgtgcaccaattgttccagctgactcgggaggctgagacgggaggatcccctgagcccaggaattcaaggcaacagtgagctatgattgtgccactgctctccagcctggttggatttttttttgattaaaaaaatttaaaaaattataaaatgatgtcctatatgagtttaatacatgacgttggaggagcatagagatagacctagactaggcatgtgtatgtgtgtgtgtgcatgtgtgtatgcatgcatgcttatgcatgtgtgtgtgcatgcatgcttgkgtgtgtgtgtgtgtgtgtgtgtagagccttggtcatcccgacagagcaaagacacaggagggtggcacayggaagaacaagtgactccaccctcccttgcacagttaaaatctggccaaggtgagaggggagatgggagaggggagaggggagaaaggagaagaggcactgactggaggggctgaagctttgtccctcctgggcaggcgttctccatccacacccctcttcttggatagagaggataagcaggccaaagatgcacgaaacctgagttccactgtagctccagacttctagaaaagtcaacagcccctgtatctctagctgatcctctgttgttcaatgtctgcattaccgcactgggagacacttgacagattgggcctgccgcaggccatagcagacattgggcagccctagaacgaagctgaccgtccttggaatgtgccacaggggtgtgacgccccggccaactccagtgctgcctaaaatggcctcttgcaacattcccctctcttcatcttaaatcagggacttgaagccacaaaatggcaaatacacagttctggcagtcgttttgagtattggagaaatcgctctggccatctgttttgtctccagcatgtttctcacggaatatccacggatatatccatggatataacagacatcctgccaaggcagagcttggctcttgagaactcggcaagctcagtgcttgcctggattcctgcctcatgtcccatccagtgtttggagaaaagctctgagagaaagatgaatgtctgaggccacacagcctagaagtagtcaagagcrcaggctctagaactagccccacgtgggctgaaatcccagcaccagcgcctgccggctgtgtgatgtaggagagcttcttaccagctctgtgcctcacttgtctcacttgtaaaatgagaataagaattggccgggctcggtggctcacgcttgtaattccagcacttcgggaggctgaggtgggcagatcacttgaagtcaggagttcaagaccagtctggccaacatggtggaaaccccgtctctgccaaaaatacaaaaattagccaggcgtggtggcgggcacctgcagtctcagctactcaaaaggctgaagcaggagaatcgcttgaacctgggaagtggaggctgcagtgagccaagatcacaccactgcactgcagcctgggtgacagagcaagactctgtctcaaaataaaataaaataaaaatcaaagaatagcccctaccttattctcttttgtgagaatttgatgaatccggacatgtgaagtgctcagaaaggtgtctggcaccaagtgaaggctgtttgctatttgctgttgttattgttactcaggcacaaaggcagagaggagcaaatggtccctgggagcaaatgagcaggtggaggctaagatcacttggacaatggaactccatcgtctgcyggataatctgccatcatcttataaatccactatgtctaaaagaaacaccatcttttagtgcaggggttcacagctttggctgtactttagaagcaaaaaaggaaatttaaaaaattgcaatgctcagtccacccaatcagtattttctataaaccctcaatgaacaaccaagtttgagaaccacctctctaggtttttcctactcaaagacagatccagggaccagcaacactgacacacttgggagcttattagaattacagaattggcccccaccccagcctgccaaagggaaactacattttttttttttttttgagacggagtctcactctgtcgcctagtctggagtgcagtggcgcaatcttggctcactgcaacctctgcctcccgggttcaagcgattctcctgcctcagcctgctgagtagcagggactacaggcgcacaccaccacgcctggctaatttttgtatttttagtagaggcagggtttcaccacattggccaggatggtcttgatctcctgacctcatgatccacctgccttggcctcccaaagtgctgggattacaggcatgagccactgtgcccggccaggaaactttttaacagactcccaggtggtctgcacaatcattaactggacaagccttcttagagcctgggaggccctagaagaagcaaccctcaagtaggttaggtcacaaaggacgagtggtcccagagtttgtgtagattgctgagacgggacaccagaagaggccctgacctctcttggaaggtagcatgcttctgcttccagaaaccctggaaaataaaaggccgtgtttatgcagctgtggagtactagtccgtggcagggagctggagtcccaaggtgggccagatggatgtgcagcctctcggtctctctggatgcagtaaatactcataatttcatatgactcaacccagggagaagagaaatgtggcattgaacgggtgcctttagaaacagaggtcaccgcagtacctgtaaaaggagaacctgtccagcctgggtggtgtccctggagtgaaggggatttgtggggctagaggatagggtcccctgggtagccacagtcagagttattaatagttctcttcatagattgggttgttccttcacttttcacaagaaacaaggaggaggcaacctaggctctccatgcccgcctctcaccttcactccagcattttccttcaaaagacatttttaggtgtcatcttaccattctcccatcccccctgcatggcccccaaatacctggtgcagcaaatctcaaacaatgcagttttgtgggaagagcatggaatttagacccctacgtcctgagttcaaatcctgcctcttccacttactagcagtgggattttgagcaagtaattcaacttctaggtttcaacttctaggtttcctcatctggaaagctggaatcacttatttaagttcagctaacaaggccacaaagtgtaacagttaaaactgtgggttctcagagtcaggttgcctcggttcaaatttatacttactggcagagcaatttggtgtcagttttctaatccctctgtgcctcagtttctttctatgtaaaaacaagaaaaacaatacctagctctttggattattttgaaaattaaatgagttgatttgtgtaaagtgcctagaacagtggctagcagtacacagtcaaatacatatttttttctttcctttttcctttttttttttcccttgagatagagtctcactctattgcccaggctggtgagccatggtgcgatctcggctcactgcaacctccacctctagggttcaagtgattctcctgcctcagcctcccgagtagctgggattacaggtgtgcaccaccacgcccagctaatttttgtatttttagtagagacgggttttcaccacgttggccaggctggtctcgaactcctgaccttgtgatctgcctgcctcggcctcccaaagtgctgggattataggtgtgagccactgtgcctggcttcttcttcttttcttttytttttttttttttttttaaagcagggtgttgctctgttgcccaggctggagtgcagtggcgcgatcatggctcactgcaggtttggcttcctgggcgcaagtgatcctgccacttcagcctcccaagtagctgggaccacaggcctgggccaccacacccagttaattgttgttgttgttttctttttttggtagagatggggtctcactatgttgcccaggttggtcttgaactcctggggtcaagtagttctcctgcgttggcctcccaaagtgctgggattattgacatgagccactgcacctagccaagtattttttttcttttttatttctatgttctcatctttaaaactttccactgttctttctttaaaaggaaaattgtaatcatgatttgggtcctagtaagtgtgttttaagagaagtttcttttgcccagtgactttcttactccctcacattcagacarcctttcactgcttttcaaatacatcattccccattttacagatgaggcacctgaggcatagagaggcgttttgttgttggtgtgcagcatcatccagcctattcggggarttgcagaaccatgattcagtccagctctggagcttgtttattgctcatgrgaccaggcgaggccacctccaccagctcaactggggtcractcattgattaaatgagtgacctgaattcctttgattcttaatttactggtctttaagtcaagatgaaaccccctccctctccagtggtttgtggaaggagtatacagagcttgtaaatgggctgagtcaatgcctgcccgcagatgggtggtcagctggaatgaaatgcacagtgaagaccatccatgactgtcccaggcacacctgggtggagggtcctgaaagcccccatcctagcaggcaggattcagtgaaatgggagcaaggcatggtgggctgtgtgcccacctgcgcctgtgccggctacacctctcggtttcctggattgtcagcttctcctagaaactcactcagacccctcctgagtcagacagagcatccctgaaccaggactgggtttgctcaggccagaggctgtgcttgaaacgggagttgcagagaaggacttctgtgggcttggaactttttttttaattttccggacacacacaaaaatgttaggaggctgcttttagatgtttcttttttgagctcttccctgcctaggcacagtaaccatgtgtaattttcttatcaattcactcttctcgtcaggggagggctatttttagccactccactgggtcgtgtttcgagcgctytcttctaagccccaaccaagagttggtgttcaaacaggaatcagaatgattcggggtctctttcctaattaacaagaagccctaagtgagtgaaagcaagccccaaacaagcactgggagaggctggagtgggggctgcttatctgggggctgcccattttgaagaaggctgtttacaccgatccatagacttactgggttttggttggctccgggttcagaaagggttaactcatctcgcaaacccattcaccaagggtaaagaattaaattaactcatgctaagcccatggtttttgcagatggaacattctggtttctacttttcaagagcaactcaaaagttcattaacaaggaggaacttgtaatctttgcgaaggaccaaatttgaatgggagaaacggttcccttagccaataggtgagcccagccaactcctcagcccggaagctttgtcattctataattgtcattcccgrtgagccttcatcctrggtctgatggggccacttgaagatctcattgaattttgtagggaaattgcatgctaaagagacatttggaaattagcaggcttgaaggctgccttgagacatgtcccctaaaggtattttgtcaccacacagaatggctcccaaatggtgcccccccaactttcttctgctctcttcatttgagtttctctcatccatagaacagttaatctcagttcagaatctcagcctcggctctccataggttttccttcattttccagrataaatgagctggagtttgaaaagaagtgtgacttcttcaaggaactggcagatactaggggagttcagaagcagctgacatccaattattcacggtcatgsgggaaagggattgaatgagaaatagaaatccacagataatctccaaaccttatgctcatccatagccttctcttccaacatgcctttaacagtaccaagaaatgggctgatttagcgctgttttcaaaatggaggtcctgagagatcagtacagtaaaattaatttgccaatccttctcttaatgagaagcattgcaaggaatggaaattctccatttatttatttatttatttgtttgtttgtttgtttttattacttacccagagtaaagcgtcatttttcttgagcaagtggcaaaatgagcttattttcttggctggttttgttcattgtttgttgtgtcagagactagcatagaacattgtgactttcttttcactaacacaaaacaaaacaaaaatgattgggattcaggcctagataatcttgaaataaaaaccaggagctaggagaatgacagtcaattgcaattgataattgagtctccttccccaggatattaatggtgtaactaaaccagggaggaagaagtgataagtatcttgttaagataagtctttgccaaaaacaacccatggcaaattgctgccatttgttatctaatactgagcgcagagtgtagtstttcttgagcctcagaaaccctgcttgtctctatcagttcatttcaaatttaacttgctaaatatcattgtccaaagccttggcagactttcaaaagcagcgttgttgctgatctcaagcttgacacagtgggatcttggggagtctcacagaccacagcccccagtttgtgggggcatcttgatcaaggcctaggcaaaggatctgtttggagaataaaagccaagccagcctcaaagatgaacatgtgtggcccggcctgttaaacccagtcaaggcgatgggctgcagacatcctgtctttctctggtgctgtcctagaccttgccattggcccagggccattcaaaacccaaggcctacagtcacggcttcccaagctatggtaggcagaatgccttgccccttttccaagcaataagaatatgttaccttatttggcaaaagggactttgcaaaggcagtttaagttaagggttttaagatggagagattatcctggattatccggatgggtccagtataatcatcaggatgataagggaggcaggagtgtcaaagccaggaaaagagatgttgtgaggatggaagcagagcttggagtgatgtgaggaagggggccacaagcctaggaatgtaagtgacctgtaaaagatggaaaaggcacagaacagattttcccttggagcctccagaaggaacgcaagcctgctaaccccttgactttaggacttgtgacctycagaatggaagcagttgtttgtagtgatttgttacagcggcaatagaaaactaacatgcacacacccctttttagttggagctaagcttccctctcccaagaccagggtccaaaggaggcctgggagaggccaggtctgtgacatcaggtaagcagtccggcagcagcgtggtgagtctggaaaatgggatgctgatggttgtggtgatactgcctttttcagaattgttttgaggatcaagtgaggtactgtgaaaatgcctggcaaatctaggtataagccggcaaccccggtgacccccacaggcacatcatggcttacataccggcagggaataggctgagttgatacaaccaaaatccttgtacatattcataagaactctttgacaaccacacattcaacctgaaatttatatcagatcacagttttgtggataaccaaaatccttgtacatattcataagaactctttgacaaccacacattcaacgtgaaatttatatcagatcacagttttgtggatgggttcctataggtaggaggtactaccactgtttagtcagtacatttattttttttaaaaggacggagtaaatatttggaattaatggtgttatatttgtcaagattttccttcatgaaatgattatataattcttacagtattctcaaagtaccygcatagagactagcttcattgaaactcacaattctctcaaggttggcaggggagatattatcttcccattttagacagtgcaaagagaaggaagatcagagtattaaataactctccccagccaagtaagctcttaataaatgtcaggtaaggctaaacctgaacgtcgagcctagagagggcaaagagcatgccggttcagagcagacacccctgccaggcactagctgggtgactttgggcaagttacttaacctcactgtgcctcagtttcctcatctcccaatgtaaggataatgtacctacctcacaggtttgttgtgaagactaaatgaagataatgcaataaacggctgagacccatgccaagcacatggtaaaagtgtgtaattgcgtattagcagcagcagccagagcaatagccaagggtcaattaactcccagtccagtgttcagttcatgattgtccatgcattaagagccaaagcacccccaaagccatctcaccctgctgaagcagtctaaagtgctcaactaagttggtgcattaatctctagaccagaggtcagcagacgttttctgtaaagggccagacagcaaacattttaggtctctgttgcaactactcagctttgcccttgtgaatgaaagcagccaagacaatatgtaaatgaatgggcgtggccagatttcatccacaggggttccctgctttagactgtgcygagagccagaggtcttgarttcaagtcccagcctcaccacactgcaagggtgttcttgagcaagtcaggaaggctccccagagtcaggcccttagcctctaaaaatgggaataataatgcctccctcaagagctggtgagacaatggaagctgtttgtaaactgtaaagtaccgtgcctgatttggttattagtgttttattgctgatgtayggtcgaggtccaggccacccgtggtagataaaagtgcatgtgggctggacgaagtggctcacgcctgtaatcccagcactttgggaggccgaggcaggtggatcacctgaggctgggagttcgagaccagcctgaccaacatggagaaaccccgtctctactaaaaatacaaaattagccagrcatggtggcacatgcctataatcccagctactcgggaggctgaggcaggagaatcgcttgaacctgggaggcagaggttgcggtgagccgagatcgcgccactgtcacccagccgagatcgcctgggtgacagagtgagactccatctcaaaaaaaaaaaaagttcatgtgcccttggtgtaaaatactgggctctatctcrccgtctctgctgtctgcagttgcattatgaaatcaggaaagggttatttaatttcaatcactttcaacttgttttggggtatgagaaacacaccagcctctgaaagcttcccgttgctgtcatgtgatgtttctctagccacgaagccttgtgtagtctgagttgatcttcattctgaaaatggcaaatgaacagaatgaccatgatgaatgggggctcctgagaaacacagcactcgttctcagtgtctcaggctgggggagtgaagcctgcagccttgatggagggaaggtatgtggaaaatgaattgctgagcggaatctcagagaatggctgctgaagaaaagcatttcaaggagcaattatgcagctcattaagatgcactccattccggcctctgatcctaggggaattgtcagagcaattatgtgcaaacctcaattttgaggtctgaaaaggggttggtgcataatcggcaggagaagaaaaagaagggagacggtttgaaacaatgggtattaaatgattgtcacagcaaggaagacagggatggaaggagtggacaccctgggtacttaagactgaatgtgtggtctcaggattgcatacgggccatgtgggcagtgcatttggtacccttaataggacttcttggaatcaaagtggtttgctttgtacaaagttgtaagcatggtgtttgggatatgtttgttgaatgaatgaatgatttgtgcttgccatatcaaatgaatgaaggtgggaaaaatgmatgaagaagttaaaaaggttaagaattcatgtaaaatgaagataataatcatacataccttacacgactactgtgagaatgaggtggtataatgcacttaaagctgtcagcacagagcctgacagtggcaggctctcaattctagctagtattgggattacattttcccaggtgtgttagtcagctcagactgccataacaacataccacggactgggtggcttgaacaacagacatttgttgactcgggtcttggaggctggaaacccaagatccaggtgccagtaaggttggtttctggtgagcctctctttttggctcacagacggccacctttttggctgtgtcctcacatggtctttccacggtgcccgtgcactcctggtttctcttcttataaggacacggtcattctgggttagggtcccgcctttatgacctcatttaaccctaattacctcttcaaaggcctcatctccaaatacagtcacattggaggatagagcttcaacatacaaattttgggggacccacctcattccataacaccaggtgaagaatcagactttgctattgaggttattaggcctgatcttgtgactaagcagctatgcaaaaccttttaaagccactagaatcactgtttcctgagatgccaaactggagatgycccagtgttctagaaaagcaaatagacttccagtaacttatgtccttctgtgttagtgcctgactctgctattcagagatgccagtgaccatcctttttctttttctttttctgagacggagtttcgctcttgtcgcccaggctggagtacaatggcttggtgtcaggtcactgcaacctctgcctcccgggttcaagcgattctcctgcctcagcctcctgagtacctgggattacatgtgcccaccaccatgcctggctcatttttgtgtttttagtagagatggggtttcaccatgttggccaggctggtcttgaactcctgacctcaggcgatccgcccgccttggcctcccaaagtgctgagattacaggcatgagccaccacgcccagctggccatcctttttctttccactgttaagacaaacaggcaactcactcatgctgtttttctgaaaaaagcaaaatttctgaactgtcttcttaaggattccataaaacaggtgccctgggagttgaaattgaccatgtgaacctgtgattttgtgtcagagtgagcactactaaatctcattttcttccctgtcttctttttcatttccaaatctgcccagaagacagtaaaagctcattaatttgaaccctgctaatttagaatatgtaacatttcctccaagctcaccatgaaggaggaatttgtgaaacaaattaatagtgtgaacataattagaaaagatgagtcttgtagtgttgggaggtacctggaggtgatccagtccttttcattggtggcttgtttcttttcaaatgaggaaatcgaggcccagtgaggttctgtggctcttccacactcacacagggggactgtttaacctccttcaggacaccagcctaaaacacggagtcttatttgtttgtgaaagacacaggctctttattagctgtgggttccttttacaatgtgaacctcaagtactaaaagtgcatttttaaagaaatattctgcatttcaggtttcccactaattatgactggccttctcccaagttagtttgagctattttggtgaggttttatagtgatttaataagaaaagcttttttaaaacctcataaaaccttctgtacaattcattctgaccaacattccctcttacaattatgtcattaacaacttctttttaaaagaccagaacttttgtctattcatgttaaccttaaaagcagcattcaccgaacccctgagaaacaaggagagctataatactttacaggattggggcagagcacatgaaatcatgtgtgagagagggttctgtacatttgtttttcttaattgccatttctgacttgggcagcctccccacccaaaaaaaaaaaaaaaaaaacatggtcaaaatatacttgtgcatgtaaatgtggtatttcctgggagagtcctgagggaatggcctgttttccatgtgatttgttttttaatagacttgatttttttttttagagcagttttaggttcatggcaaaatcgagcagaaggcacagarawttcccagacacccctgcccccagacatgcacggcctcccccgtcatcagcatcctccactgaagtggtccatttgttacaactgatgaacctgtattgacatgtctttgtcacccaggctcacagtttacattagggttcactgttggtgttgtatattctacaggtttggacatgtagccacgtgtcattatacattttagagtagtttcactgcccccaaaatcctgtgggtctacctgtccatccctccctccccccaagcactggcaacccctgatctttttactgtctccatagttttgtcttttccagaatgtcatatagttggaatacaatatgtagccttttcagagtggcgtctttcactttgtaatatgcatttacattttctccatgtctttgcatggcttgatggctcgtttctttttagtactgaatattccattgtctggatggaacacagtttgtttatccagtcacctactgcaggacatcttggttgcttccaagttttggcaattaagaataaagctgctctaaacatccatgcgcaggttttttgtgtggatgtaagttttcaactcctctgagtaaataccaaggagagtgattgctggatcctatggtaggagtatgttgactgtttaaaaaaatttaatgagatgcctatttattaatttaaatcaaactgtagctgccgcatggactggaatgtcctcatcagcagatcagcgcatackctccccagagtcagacctactggggcaccaaaccgcaatcaacaggttattcaacaagcscaggttcagagcccccagcaagatggccagaattactaagtgttccttagccttgggacatgaattctctgccacagccacagccaacaagaatggagcactcccaagtatttgacgggcttcttattctctccttttgggcatttaatacatctttaacacaaatcaggattgtagaagattagggcttattttcaaagtgtcttctcagcataaagtcagatgatgatgatgatgatggtggtggtggaggatgacagaattagcaggtggtgggtgtggtggtgataactagcagcagcagcagtggcaggactggtggtaattattgttgttaacatttcttgaacactcgctctgtgctttacacacattatttcartcatcacaactctttaaggcagacactctgtttgacagatgacaatgccaaggcccaaagaagttaatcactttcctaaggtcacacagctggcatgtgatagcagcgggaggtaatccccagccatctaatgcccttatccccttccccgctgcctggcacagtgctctaagtctctatctgccaaggcttttagaagtcatttgatgcacggagtgatgtatctcagggccccgacattcgccattaaacccgaggtcaggagacaggagactgcagttgtcctgcttaatcccaacggtcccgttcttcctgtgtttcttttaagggatttctctccagcctcacaaatgctgacaggtggcccctcaccccacagggctcgctgactgcacgtgcccagaccatctcttcaggttccattttttacattcaagagaagaaaaagggcaaaagatttctattttaagctgtcagacacaacatgagcctatcaagacttgttgagcttggaagcagttccagcttcttcctcagaaagcagaaattttgactttgggccactgatgctcagtgaaatgtgtttccgttgtccagggtaacgtggcgttgaattccgctgacagaagaggctctgcatcggctctaatgagcagcatcatttcaatagagctggcccctccctccctcttcagcctcatcttgggcccctctattccttccagccctccaggccttggtttagttcctctgctgtccttgctttttcctgccaccgggcctttgcacctgctgttctttctgcttcacctctacttggctgactccttctcagcctttagggtctctagggctggtcacatgttcctctaatacccttgcctctctttgagagccctttgcttattgtaattattttatgactttctggttatttatttattgctgtcttcctcattggatgctaaggtccacgctggctgcctctgtgctggctttgtgcctaatgtactacatgaaacaagggggagctggatggatggacaagctgggagcctcagggtgaggataacggcaccccaagcttcctaagagcttagtcttctggctagtctactcaatgcctcattctaaacgatctagagttgcaaattgcacaggggttaagagcaagtgctctagaatcaggctgcctgcatttgtattccagccctgcctcttactagctgtatttgtttctcttgctgggtaacaaatcacacaaacttagcagtttacgacaacatactttttttaaatcccacagttttgatgagccaggagtctgagtatcttttaactgggtcctctacttaggatctcaccaggctacagtctcatgtgaagcttagggtccttgaagctcacatggttgttggcagaaattgtttccttgtagccatagaactcacagtggcttgcttcttcaaggccaagaggacagtctctctgagttcagagaaggttaagccctctttaaagtacagatgccccttgacttacaatgggcttatttcttcataattctaagttgaaaatatcataagtcaaaaatgcatttggccagtcacagtggctcatgcctataatcccaacactttgggaggccgaggcaggcagatcacttgaggccaggagtttgaggccaacttggctaacatggtgaaatcccatctctactaaaaatacaaaatttaactgggtgtggtggcacgcacctgtaatcccagctactmaggaggctgaggcagaagaattgcttgaacccaggaggtggaggttgcagtgagctgaggtcgcggcactgcactccagcctgggcaagagttaatgggactccatctcaaaattttttttaaaaatgcatttaatacacttaacctatgaaacatcacagcttagtgcagcctaccttaaacatgctcagaataccaacattagcctacagttgggcaacattatctagcacaaagcttattttataataaagttatcttgaagaattttgaatcagatttaaagccaacccattgttaagttggagattgtcttacttattccctggttaggttagccgcatccaggataatttttccttttgattaatacgtaactcacttacggatcttagttatatctgcaaatcccttcgcccttgctgtgtaatataacataaccgtgaagtgatatcccctcacatccccaggtcctgtccacactcaaagggtattgtacaggacatgtataccaggagcaggaatcaccaggaccatcttagaattctgcctaccacactagctgtgtggctttggggaagttgcttaacttctgtgtgccgctgtctgtagagtaatacccacttcataggatttgttgtaaaggttaaacaagttgatttatggaaagtgcttaagacaattcctggcaggtggtgagtactcaataaatgttagctgttacaaccataaagatgaggataatctccagccgagccagtgggctcccagcttagaaatgcagtccaccaactggctggaaaatgaaatccgagaagccaggctgacggggaaagaagacaccagagaatatcaatgacttggtaaattggccttcccgaaagggaaactgacagcttctactccaccaggygaaaatgggcaaagcaggtggaaagctgtatcaagttactaaagcaaattggatctacgtgggtgcacgtgcccctattttagttcgtttcatgaaaacatctcttctcaaggcaaggagtcatggcctcatctctctggaaagctttgaaatcccttacatcagggatttaaatcaattgatatctctcagatatgaagaaatgagcataattggatatcctggcaacttgtgtcagcagctgcaccccaaagtttatgtctgccttaagggaaggctttcttytgaaacaggatctcagttggttcagtttaagaataagggcctctcattaacactagtgagacccctaataacgtgaacagggttattaggtctcactgacrtgtggtcaggaggaggcccgcctgggaatttgccccacgaagtgtgcgttttgctggagaggagagtgttcagaatcgatttgttgctccgtctgggatgctgttaaccaaatgtgggaagaagcagcacagtgagtcaatggagcaagttcgcagtggcgtatttatgaatactggctggttgggggagaggaatggtgcagcttctttctttggaagggactcgctttattgaaatccttttcagtggggtcacccggggcaagtcattcactcttcctcagacctcatagtttgcatctgataattcaactcaagtcattttattgacggtggtagcggaccctgttggtgctgtgcccagaccatccgttttagggtttctggcctctcatcccccagcgtctatgtgctttccctctaatggctgcctgcacctgcgacttgctttccgaggccacctttgagctacaagagctgcttctcccatgcccagagatgggaaggaggctgggaagttacctcttcatgggggaccctcagcctggctcccttaagtcaggacaaattcagaggagtaaagttatgttccagagctccccatgggatcagaattaagcctggcatgaaggcctgaattccatccttgctggggcctctccacctccctttgctctcaggactggctacatgatttgcaggactcagtgctgaatgaaaatgcaaggccccttgttaaaaaatgattaagaattttaaaacaacagtgacagcagagcctaaaacctaacctaagacccttctgattgcagggtcggagccacggcacaggttgcacaactacgaagctgggcctccctgctccccaactttcccgggagctcccccttattcagtcccttgcatgtgaactcatgtcttgtactccgctctgatgaacctgacttaaggccactgttgaggcacaatgctgaggggctggattctacagtagatacaacaccaacccttccctcgaggggccgactctttagcagggaagacagatgtaggcacagatcatcctgtcacagactgtgaagcagagccccgtccccgaggtgtctgcaatgtggggaggtgatgctgcctgggaacacragacctcctggattccaggccagggttccgtcttctgccccaaatgatggatgaatagaattgggggtgatgatatgggggaaggatggggcaccacttcagaagagcacagcgcaagcagaggtgtagtggggggacttccatttagtttgcaggagcctacctgtgctcagtacagaagacttgaatttgaaaagtccaagttcctgcccccaggtggttcacaagagatgcgtacaaccagctctggtggaattctgtgcaagggaagtgccgagctaacggggatgaggcgaagtgctagatacaagaggagcctggtctcctaagaagttcccactaggtgttaggagtcctagagcttctcatcaaagaaaagattctctaactgtggaatttcagaaattggcaagctgtcagggttggtctgggggaggagggaacctcctgaaatcactttatgtgatgggttcctccatccgctcaaacgggtttcttagttttagcccatcagtctgctgaggtgaaattaagttctcttccaagtttgttatctgaaatgaccctgggtccgtcagtactgcagctgcaccctgacctgggctggtgacagtgctctgcaggaggcgcccactcgttcccggtcctcctccgggaggagcccacagacaccacactggtttcccagtacactgaagctatcgctgacgttaaggagcctcttctaagctgggaaatgtgggcagctggctgcggtcctccctggagggggtgagggaaggtgttggtgaaacgcttgtggttctcaggggccctgggaaactcttttctttatcatcgactttgtcaggctgaagccatctctcatttttcagagcatgctcatgggcagggagggtgagagctcttccatccgggaataagtttataaatgcacgaaagcagctgggctttgccgggaagcaggatgagggggctgccctgggtttgatgttgtgctctcttctaatgctggaaatattcagctgctcctgggttggatgtgagcaccaactgaggctggctcataattcttccttgacaaatgcctcatttgggacaataactcatgatttcttcactgcctcctattaarcaattaaaagaaggcacacattattctatgaatatatatgatcaaatgattttaaattattgagtggtgttggaagccagagaacagtgagggaaagaactgcatgtgctcctctccctctgtctttttttttttttttttttttgagatggagtctcactctgtcacccaggctgaagttcagtcgcgtgatctcggctcactgcaacctctgtctcttgggttcaggcaattctcgtacctcagcctcccgagtagctgggattacaggtgcccgccaccacactcggctcatttttttgtatttttagtagagacatggtttcaccatgttggccaggctggtcttgaactcctgaccaggagttccgcctgcctcggcctcccaaagtgctgggattacaggcatgagccacaccgtgcccagcctctccctcttgtcctgttttagaattttattttattttttagtcaggcttcagaagggccctggaacatggctctgtgtgatctggcccctgcctacctctgccacatctcagagccctctgtcccacagctgcatcttcctgtcctctgccactcccagctccccctgccccacctctctgttccctctgcctggagcatcctccacattctttctaggggaccctggtgcccccagctagcttaggtcctctcctattccctycccttgacttttgcttttcttttatagcacttcattcaacaaatattttttcagtacttactatgccaggctgttgtgacatagcaattaacaaaacagacacaaagctyggtccttatagaactggtaatctaagctcattgccattgtgttgatgagtaattattcagcaattggtttgttaacttgtcttctccactagactggaagctccatgaggacagggccatatctgtctcgttcacagtaccatgaatccccagtgcatagtaggcactcagtaggttcctggggaatgaaagacattctgggattgatggctgccatttggccatctaggctctctgaggtagctgcatcttccttgggaatccagaggtcgtcatgtggaattacctcctcaagactgaattacacagcctgttagagggaatataagaggagccgagctggctccaccacagggctgccgggcctggagctggtccctgaagaaytccagggccygcaggatgctcacggtttgtcctttgccacgtgcccgacacgtctcgcaccatttccaaaccgctcctcgagggtctctcccctcttcaacttctgtgtatttttgcacttacaacttcttggggtcattttactttatgtcaaatatatactggctgggtgatcatgtcagggccctttacttgccctgaggcacctcttctaggtgtcaagaggggtcttccctgtttggggttagctgagcaacttctgtttcaccattgcttttaacccagggctagtggcttcctactgatgtcttcagaccaggcattaacctcttaaaaaccccacaccttcagctgaaaaacagatcatcactgtcctcaacaatatgcatttgctccatttactcctggggttgtccatttggctgttcattcattcatttgttgagtcattcatcaagggaaggagggaggaagggagggagggattggggccaggactaggtaaggcaagctgggctcctgggttgcagaatttaaggcagcattcaccctcaggaccaggcaagtgcagagtcagcagtcctgttcctgggtatggagtcctgtcctgcccccgtacccagcttcattctcctttgagatttcatttgtcacaaaagcctttcactaggtgatgaccaagctccaaaggtgaccccaggtaacccacgaggggcctccgcacaccctcacatcacctccccaccatgtccaagctttgtatgtagcaaaagtctgtgaaagacagcgtgggagggaagtgagactctccacattttcaggaataaaaagtacatttttacacttacttgattacttaaaggccccatctatcgcaaatgttgcctggccttccggtggcacacgcccggggcttccagtgttttgatataaacccagacccttaagaagatgtaattgccggttgtcttacaagcagtcatctcatcacaggggggttggaaggagaattcaggagccaaacagccgcaagagcacctggcagatccagttccgctggatgatgtctttgaacaagactaaaaatgactgtgttgatggcttcgccgttttccaacatttggtggaatgacagagccttaggacatgtctgtagccacatctgccatctctgacatcaactgagtgttactaattcccattcctctcttttaatgaaggaagagttcatcagtgctgrtctcatccaaagaagcaaattagggagtctgttctttgcaaatgttggggcgtggttggtgattgctcagtggagaagcagctgctggtgatcaagtcctctgtgttcaccagaccccagtatgtacaactattatgtatccataataattacaaattaaaaaagaaaacagctcccaggccaacacacaacaccgccttaatgaacatcattgtcattcaacctgtgtagttttcattccggacaggatgggctgctggatgcagtacaatttaatactattataattaacatttacagagtgtatattatgtactataagcttgccatgaggtttgactctggattgtgaccatgatcacccccattttacagatgtggctattgaggcctggagagttcagtggctgatccaggttacacagtagggctgtggcagaggccagatcagatccaagcattggcctcccgtgtcctcatttctgtgttgttcagtgtcctcagacatcccgctccatttctttgttcaacgctaccaccctctaccctggccagactgggttcctctctaactcaaagacacatgatgggacacacwgtgctttacagggaaggacagtggaggccaggagagagaaggctgaaccaaagaaacttcctaaggctcaactgtttatacagttctctccgtctgttctccatgttctctccatcagcctctgaggagctcgaagctcctgtaaaagtccttggccctttaggtgcgctctggtaccgtctttctctatggcaccttttgtggccttcaggtaaagagccaagaaggaacaccccttttatttccccttgattttygtgccgtttatttatttatcagtattgtctagccttttaagagcctggatgtgagtctcggctctgctactttgcagctgtgtgaccttgggcaagtgacttaacctctctgtgccttggtttctttatctgtaaaatgggataatagtatctagctcatggwattgttgtaagaatcaaaggagctaatcaaagtaaggcacttagagcatgaccaatatatattaataggaggctcacaaaaaaatctagctcttactgcaactcstactactcctattttttttttttaaaacaacttttatttttgcacccctgtactggaatagatgatcttgggcctggtttctgtaagcaacactgactgtcatcatctgtaaggataagcacttagtgactaaactgaaatctccaagtcttgcttttaaaaaaraaagacccttggctggctaggcacagtggctcacacctgtaatcccagcattttgggaggctgaggcaggtggattgcttgatcccaggagtttgagaccagcctggccaacatggtgaaacctcatgtctactaaaaatacaaaaaaatgagctgggtgtggtggcacgcacttgtagtcccagctacttaggaggctgaggtaggaggatcacctgagcctggaagttgaggctgcagtgagctgtgattgcaccaacagcattccagcctgggccatgggagtgagaccctgtaaaaaaaaaaaaaaaaaaaaaaaaaaaaaaaaagggggttgggggaggggggagggatagcattaggagatatacctaatgctaaatgatgagttaatgggtgcagcacaccaacatggcacatgtatacatatgtaacaaacctgcacgttgtgcacatgtatcctaaaacttaaagtataataataatttttaaaaaaaccacaaaaacctttggctacaaaatgcccagcctgtatccagattaaaatctgtgtgagacctttctatggcttccttcctgttgcacttagaataaaatgcaaagtctctaacaacgtccatgagggccccgccactagcccctgcctgccttccaccctggcactcaaagctggtcacttccctgttccccactgagacttggattttgttgccggagagactgcatctgctgtcccctttgagtggaactcttgctctgaccttcaacccatctggtcacgtacatgcacttggtctgcttcctgctcagcaggactcagcaaaatgatcatctcctcccttctccctttgccgcacccccccaccccaaatcaggtgtccatgtcacaagctcccggcacttctctttctgtgtctgggtcctgccaggctggaacctctatgaggacagggactccttacaaaattcaccaccacctcctcagtgcctagcacaggtcctggcatagagcaggctctctcagctgagcaactcaaggaggcacaagcaccaggcaatggtttaccagtggtatgttgtgacctattgtaaaatgggtcttccgggtcataaccaaccttggaagcaggggaaaaggmggaggagaaaggaggagcaaaatgagaaggagctggaggaaaagaaggaggaagagagaaagaaaaagaacagaacaaaacaaaatagaaaatatcagaagacattgcatgtgaaaggagaaaaatattgtctcgtaagactttcattttgtatatgtgtgaacagatgtgtgtgtgtgtgtgtgtgaagttgtacaatatgttcttactataggttgaagtaaaaaagaaaaaggtgggaaagttacctgacttaaagtgtgatgatattagcaataggtgtcaaccacttgactcaacctgaactcctgcccttcccaatggagtgggatgggaaaaygcagtcagcatccaactgccacttgaattaccaacatccactactctcatgataaagggtgtacgtgggggtgatttgggtagtgggcaggatagggtattgtgaggtaagggttggggtaacaaaaaatagccttgcatttctgccagaaatccccttytttaagcctgctaactttgcagaagaatgggtgtgggacatttgtctcaagttccttatcctgtgttgctttggctgaaatctccgatgaatatgtgcagcttacctaaaggaagaatttctctatctgratggatccaggtcctgcaacttctttcatagggtataactttagttttcagccgctttttttctgcttcctagaactcgaaaggtacaggcagtctgcaaagtgcagtggcttttgagttgaacaaatcccaaataccagtggcaggcacagatcccaaaagctgcgcatgtggcttttctcctggcacttgagctgagattgtctcttttagaaatgtcagcttgggagtgggaagcttgaaaatgtcagtcttgctagtctgtggcttggtgacttttaggaactggggttctcagaattgcatgtgcctttccatgacctttgttagaaacgtatgccatcctggagtttgcagggcatgtggcaggaacttctgattaatatgctttgaaattcaggtctggagtcacataacccaygttggcatttctggtatcagttcacatagtttgaagtataataagacatacttgtgtattacaggttgaagattaagatggcaaaatactttaacaccactggtcacagcccaaggactatayataaatagcatcaatcctaaaggccccaaactggaaacaaatgtccataagcttgtgaatggatacacaaaatatggtatatccatacaattgatacccaaccacattagtttgcctacacacagtaagccaatcactgtgatgatggattttcctaaagagaagtaattttttcatgaggcagccaagctaggaggtaggagaacaggtctcaaatctgccttcccaaagatgggattttagggatctttatgggatagaggagcaaggtggcctgaggcatggggaaaggcgattgtgggtaagagaacatgaggtaattggcaatccatgcatacgtggtcaagcttcattgcccttcacggaataagagttcagaaaatggtggcattaacatgatctgagggagtagtgtttggccctctgatgtcaaaaggtcacctctcatgcctttgtgcaggcccagttggaggtcggtggtctcaaccagcttgtgtttgcaaaacacatacctaaaaaaagactcatataccaaatatacagagaactcttaaattcaacaataagagaacaaacagcccagttaaaaatgggtgaaagatacaaacagatgtcgccaaaggagatctacagatggcaagtaagcataagaaaggatgctctacatcatatgtcgttagggaattacaaattaaaacaaaaatgaaataacacttaatacctattagaatgtctaaaatccaaaacaccagcaacaccaaatgctggtgaagacatggagtaacagaaatctcattcactgcgggtggaaatgcaaaatgatacagcccttttggaagacagtttggcagtttcttatgaaactaaacatcctcttatcatgtgatccagcagttgcactccttagtatttactcaaatgagctaaaaacttatgtatccacaaaaatctgcacacaartgtttatggcagctttattcataattgccaaaacttggaagctaccatgatacccttatacaggtgaagggataaacacactatgatgcatccatacaacagaatattattcagcaatcagaaatatgccatccagccacaaaaagatatggaggaacctgaagtgcatattactaagtgaaagaagtcaatctgaaaaggctacgttctgtatgattccaactatatgacattctgtaaaagttggcaaatgtctgtaaacagcagtaaatgactatgggggcagtaaaaagatcagtggttgccagggtttcaggaggtggggagagggatgaacaggaagagcacaagggatttttaggacagaaaactactctatgcaatgctttaatggtggatacatgacattacacaaagaatgaagtctaatgtaaactatggacttcaattaataagaatgcattgacagtggctcatcagtcacaacatatgtaccacaccaatgcaagatattaatgatagggacaggaggcagggaaattctgggcagaagagggttggtccccagcgaggtccctaccctcaagctgaaaagcctaatactgtagcccaaagtgagaccttacatccctgttttcccgctcaaatgttgcctgccccgacccccatcctgtgcccataaataccccaggctcagccaacagagaggggagaagcagctggacattggagactacagttggatgtcagaagcagcttgacttcagagggacagcttgatggcatagctttagagatgagtccaatcggggaccactggactccaggggaaaattaccttcccactccttcccctttttagctccccttcctgctgaaagccactttcactggcaataaaatcccccacattggccatcttcaagtcatttgtgtgacctcaytcctcctggatgccagacaagaactcaggtgccacaaatgtgaatgcaaaagggtgtctgtcacatggaccatccactgagctgttaacacttaatctgtccatggatggcaaagctaaaagggcactgtaacacttcttccggggcttcaggggtcatggacaccctcccctagatgctgccacagggtcagtacagagttcgctcttgctggcacccaaaagcgttcacccccacctcctgcacccattcacctgtgttccccctcctctgaggggtggaacagtgagtgagtggaatttgcccctgccagcacccatgtactccagttcctgcctgcaaaggggtcagggaagtatcctgcttcattaataatgggaaactgggggttaaggtatgagtgtatgtatatggaagctctmtatactttccactcaatttttctgtcaacctaaaactgctcaaaaaagagaatctattaatttaattaaaaacaaaactgggtggaccctacccaccttcctaccagcaaacatgagaaggaggatggctgttccccagtgctgacgggggcactcaaccttctgggggcaatttagcaatggataagaaaataaaaagtctgtaatcaccttgatctggcacttctaggagtttatcctaaagccatggttctcaaccaggggggattttgcaccccatccaccccagggaggacatttggcaacatccgaagayagttttgattgtcagagctggggagctgctactgtcctctagtgggttgaggccagggatgctgctgaacgtcctatggtgcacaggacaatccttacaacagagtcatctgatcctgtaygtcattagtgacacttctgagaagcccaaatgaggaactgggtaggtacatagtactcatctcagtattgttcacagtagtgagaaattagaaatgatcaaaatatcatgtggcagtaattaaaggatggtatatccatactatgggatcctgtgcagcctttagaatggcagtatgggagtatgatctctaatatgaaaaaaaatgctcatgagacatacatgaaaaaaattacaaagcgacatgcatagaagaattgtatcattgtaaagacagagtacctatgcgcatttctttttttactttttacaaattaatttgatttttttaaattttgagacaaggtcttgctgtgtcgcccaggctggagtgcagtggcgcaatcgtggcttactgcagcttcatcctcccaggctcaagcagtcctcccacttcagcctcctcagtagctgggactacaggcgtgtgccaccatgcctggctaatttttgtatttttgtagagatgggatttcaccatgttgcccaggctggcctagaactcctgggcccaagcgatcctcctgcctcagcgttcacaagtgttagtattacagctatgagccactacacccagcctgttatgtatctctgagaagacacataacaaaatctcaagcctgtgtctaggtggttggaatataggtggtttttaacttttaaaattattttggggatttagatttttttttttacaatgaacatttattacttttataattaaaacaagaatactttttaaaattaagaaattatgcaactagatrtgtagtcaagtagaggttgcttaaatactaaggtttattttcaactactaattactttcaaaagtattttaaggaacacattgtcataccaattagatgcccactacatgcaggttttgtacatttcatttacttctcaaaaagccgtgttgtaggctgggcatggtggtgcacacctgtaatgccagcactttgggaggctgaggcgggaggatcactcgaggctgggagttcaagactagcctgggmaacatagtgagacccctgtctctacaaaaaaattaaaaaattagctgggcatgacggcacatgcctgtagtcccagctacttgtgggaggctgaggcgggaggatagcttgagcccaaaaatttgaggctgtagtgagctatgattgtgccactgtgttccagcctaggcaatagaacaagaccctatctcttaaaacaaagcaaaacaaaaaaccgcaaaccttgttgttgctcctcaccacccattttagagatgaggaagcagaagtttggagggttagatacgtcagatgcagagatggggttctaccctgtgttttcaaagtccaagtctttccctctgtaccatggtaggggcagtgtgccactgtagtgggtagcgtgtttgtgtgggattatcagtaacagatttcttccaatatgctcttttcaagaactccagcacatttaggggatttccatttgaggaacttaagaggacattcagagactttttcttmacacacacacacacacacacaaagttctcatgacttttttttgttgttgcacttgaggagtttttcctatctggaaaattcctttgcctggaatggcttattctagatcagggatggaaacatcagttgtgcctgagaatctggtctgggtctcatgagcgtgttttccagctcctggaaagccaagacttcactgttttaacccagggtaagaagggacctctctagaacatttctcagctgtcatctcataaagagacttgtcaaacctgattcctctggtaccaagaggaagcaatttgaattttcttatttcctctggagtttaggggtgcagttagcaaacaaaggaacctcttaggtctctctgcctttgctatctgctagtggagactgcttttcttggacggtttctgcaaggagctgtccggccagttgtggattggctcacgggatggagaactgcttcctctgaagagagggacttctgcttcctcctcactgtgcttattgctgctcagaggctgctgggaaatctctkccgcagccaccctcccagcgtgcacctcctggatatctgtccatggaagctcctggacaccccctascttccctgcatctgggtggactcccgcatgcacttgctgcatttcgtctcaggttgccttttgactctccaccgcttatgattccactcggtggcctccctactgatgtctttcctcagccatcttgtaagtggtttctccttggttccagccctcactgaggccagattctgtttcctgccttcagtgtctaacgtgtggccaatcctctttcttcaaaggcagagtggccctgcttgcatctgccaaaaagacacacctgggctccctgcagctggcgtggtgctgcctgggcatcctgccaagccagcatgccctctttctaggggagctttcctgcttctggttttcaaatccttgaagcagcactggggaggcgatgaagagggtcaggtttggagtctctggctgagtcctggccctggccctggcaggcagagtgcagctggggtggttctgtctcagagcccggtggcagactgaccagtgtaggtaggggaagactggctggacctccatctcagatctgtcccttgaaagtagggttgggatgagaccccttagaggcttcagtctggaagatagtgcaggagcagagctggtaggatttgctgtagagaccagccctgtgctggaacaggcccatkgcttatctgcatgaaacctgaggacagatcactgcagcgagccttcttccactttttttgttttgttttgttttttgagacagagtcttgcactgtcatccaggctggagtacagtggcatgatggctcactgcaagctcttcctcccagattcacgccattctcctgcctcagcctcccaagtagctgggactacaggcacccgccaccacgcccggctaattttttgtatttttagtagagacggggtttcaccatgttagccaggatggtctcgatctcctgacctcgtgatctgcccacctcggcctcccaaagtgctgggattacaggcgtgagccaccrcgcccggccttccacttttaaattaataataatagttcccatggttggagggcacccactctgagccaggtacttggcaataatcctctgaggtggaatctgtgattctcatccccaccatacaggtgaggaaactgaggctcaggaagttaaagaactgacccaacagagagccagggggctgggccaggactggagctcaggcctcctattctgctttgcaagaaatatttgtgttggaagcccagctgggcttgttggaaaagcaacctgcaggtgggggtgggcaccgcagttgtctttattttggccccttctgagtttgctstttgtctgcctgggctctggggggcccttcccacccactcaccttcccctgctggtcctggcctccaagggctccaagtccttcccccccaccctccccttggcttagctgtggactaatcccttttcccattaggtgagccaagacaagatyagagctttattaaaaggaaattaaactaggaaatgaaaggataaacaaacctcaaacaagaaaaaacaacagcaccaartaagatgagttgacagagcaccactctttatcctraagggtatccatctacctacaaattagggtgtggctcccagtggggccatcatctcttcttccaccctcaccagctctgcctgtcatgatcaagctcgtcatcatggtggcttcagcaaacatgttctttggggaccttggtgatggcaccatactctccagcgctttgctcacactagcccctcccctgatttctttctgagtcccgcatgcaggatgctgccggctcagccagtgcctccctggtgaatggacccaggtaatggctcccatgctggcttcccctacaggggagaagttgcatttcatatcctctattccactttccagggccctgcgagatccactccccgcatcccrttagtctgccctccttccatgcctcgcttccaccccactttctcctcctccttttctctcttgctgcaacctcttggtggcctttgctggcagtgttcctcctctcacctccacttcacttggccaacacctacttagtcttcagaccttgtcttaaatgttgctttctcagggtacctttccctaacctccctaaactgatttctcatggaaccctggagttcaccttcatcgtagtggtgattaaaccattatttctggccgggygcagtggctcacccctgtaatcccagcactttgggaggccgaggtgggtggatcacgaggtcaagagatcaagaccatcctggccaacacggtgaaacctcacctctactaaaaatacaaaaaatagctgggcatggtggcacgtgcctgtagtcccakctaarttgagccgagattgcgccactgcactccaacctggcgacagagcaagactccgtctcaaaaaaacaaaataacttattatttcctttgcacccctctcccgtcccagactctaagctcagtgaagaccgggaccaatgtgccaggctcagcgctgaatcatcagagcctaaagtgtctgataaatactacttattcattcatccattcatttactcaatcattcattccacarataatccctgagtgcttattctgtgctgggtaccatgctagttgctgaggatacaacagtgagcaaagccaagtacctgctgtcagaccagccactcattctgtgtgtgttcaataagtgatcaacaggaagaggaatgccyattcattctcacatayacttttaatgatgagcattgccagccaatagactggctgcctcatgtggaggtgagctccccatcacaggaagtattcaataagatcctggataagaaagagcccattgtcatgatgctgcaagtggaggctcctgaaggtccctcttacctccacgattctctggttctctggaggatgccatygggtggctgctgttgtgtggctgtcagagtccggcagcagcatgcaaggtagacatctttgttttttcctgatggaagccaactggcttctcttgaaaaccagagctaaacacttgcctttgatataaaataaattttcatttaaaaaatgccaggaaatctatttttttagctatatttttttcaaagaaaaatgatcattttggaaaacacagaaagactgaaaggaaaattggaaggactttaattcctctactcaaaggtaattattgtaaacatttaacaatggcctttttgatgaatatataaaaatatacatttttttaaaaacaagatcacatattctatcttgttcctttcatttaaaagattgtgagtactttttactttgctaaatatcgtttcaaaataagatttttacctctgtgtgatatttccatatatatatgttatctattggtatgctctatccccccaaaagttagcagcttaacaataatcgtgatctctcctgatttctgtgggtcaggaatttgagagtggcttagttggacatgtgtggtgtggggtctgtggtttgggctgtagtcagatgttggctggggctgccatcatctgaagactggattggagctttcaaggtggtgccctcacatggttatcaagttcrtacttttccacgtggcctttccactagactgcttgagtgtccttacaacatggtggctgscttccccaagtgaacggtctgagagaaagaggcaggtggaggatatgccttttctatgacttggtctcagaagccacatgctgtcacttgcatggtattctgttggtcacataggtcaatctattgtgttttgagagcatgtgtacataaggtatgaatacaaggaggtgaagtttatttggagacacctcagaggctgactactgtgtatcctctttctgcaataattgcttcttcaccagtcccctcttgttgggtatctatattgtttccactgtttcactctcatagggcacgtacattcccgaaaaccttaggtacctgatgtggaacaagtgcctgatctacatttgaattcacttagtccaaccagagtttcaaagttacaacttaggagcagagtcattttggggccatacccaaagctgcctcccatttggaccattccctttaagcattttcacasaccatctcctgaagggatggtcatcgtggttcggtaggttagcaaggtctggcaggraacaaaaatcaactcagagactstcatgaaggccccacttataaagatctgagcagggggctgggcatggtggctcatgcctataatcccagcactytgggaggttgaggcaggtggatcacttgcggtcaggagttcgagaccagcctggctaacatggagaaaccccatctctactaaaaatacaaaaaaaaattagccaggtgtggtggtgtgtacctgtaatcccagctactcgggaggccagggcaggagaatcacttgaacacaggaggtrgaggttgcagtgagccgagatcacaccactgcattccagtctggacaacagagcgagactctcaaaaaaaatagaaaagaaagatctgagcagggactagcaaaccagcaagatctgaggcaccctgaaactggcaacagagatgagccattgtcaccctgaggcctgaagagccggggtgacagctgcctgaactgcagtggaagcaggggaaatacacccttactccaatcaacctccccttcctgcctctcttcctttctgtcctcttgctggttcctcctgttggccaaactgaaacagaggtcagccagctgccagcatggagcccggctgatgtaggatgggaatcagcctcagggatgrgggaagcagagtagagaagggtggggaatggatggggctaggggtgggaaaatgagggaatgggaaagccaacacattcagtcaatattcttggaacatcattaagacacagaacagtgtatcggaacagaggttactgactcctgccctattgtagatctggggtaattttattattaataataatcttaacagcaatattagctatcctgtgttaagtcttttccatgtacagggcattgtattacattacagggcatttaacacatacaatttctaatctttacagccaatctgttaggcacatgttattatgagtctctttcaggcaaggaaaaatgagtttggaaaggctcagtatctgcctgaggtcacaaaatctgtagtagagctaggattaaactcaggtctgttttactctaaactccaagtgcttytgtctaaaagcagtctagaccaacctaagggggagtaggcgaaccaatgtggtttctgtatgaagctttcaatgccttcttccacagtggagcaataattttaaaaagaagaaggaagagaagaaaatctttagcatgccaactcatctgaacaactgcccaggagtcagagtatagtgtgtttggcaaattatgagttttgtgtcagtgcatacaaagtaggcaagaagtgaggaaaagatcccttgaaataatgggatggggaatgcagcactcagcatggtgagctcacataataaagtcaccttggagagctcagtaaattattgtgcagagactgctgctgatagacgaggcacactggcatccctcagtgcccctggtggctctgaaaacagtgccctggcagcyctgggcacccaaagggcactccatcaattacttggttttagaagaaaatttcccccacagtgcagatggatggatgagagaaggrttggcagaagtcagagagggcaggggagagggagagagttgcaacagaatgacattactttacacttggtattttgcaataatgaaaattacctactctrtcttcagcactggatgtgtagcaaaaaawttaggaacttctctggtctatatcctttggatgcttcctgaaatggaaaagtggacttgatgagattgtgctggggaggtcacagggtggaggatgggctggagagtggccaaaagcccacagtctccaaagactttggcccaactcttgtgtcagcctctccttgagctgaagctggaacctgatgggtttggcggatttgtttgtgtttttctaccaggtagagaattatctgtttatacctcagaactctggatgccatgattgcaatacctcatcaaccctgagatgctcagatgcttgccaagttaatctcactgattagaacctatgtctrtgagaggagtctctagaagggtcaccagaactctctgcttattcactttggagacgcgggcacagtgcgagggggagtgggacacaggagggaggaaatgatggtgggggtgggcagcccatgtgttcacaaagtctccagggcactaaagaggtgaccaggcacccatccaaggctttgctagccaatggacagttccacataggctggaattggaaatggaatttgatctgagcctaaaacgtgagaggcacaatagcacttggggtgaactttggcccaggatcctgcacacagcaggtgcttcctcagccagcattgctaagaaccttgccagtgtggaggtggttaagaatggggacgtgggagccagagggcctggatttgcatcctgccctctgtgatcctgggcaagtcacagataataatcaccctscttcatgaggttgttgcaagtgttaaatgatttaatacttgtgaagagcttagcacatagtatttattagtcattattattatgtctaatttttagccccattttcaaatagccaagccaacctttgatacccagacgttttcaagaccctcagtctggtggcccaattgccgattcatctcctggtccaaagccatccagcacatcaccatcagattaatttctaaattaacctaaaactttgtgttcattgcttatttgcatttaaaaaattaataccagatgtaagagacctgatttgcaatttggcatcagttcacatgaagatgatctgtggcttctccctgaaaaagttaatatgagccaagaatgtgacactctggtttgtttctttggaagctgcttggatgcatataatgtaattaacaagtattgaacacctactctgttggaggtgccgtgccgttcatcactgcacacctcaacagtgttacccaccactgtttttcggaagaaaaacagcttaartaaaatattaccttggaaccctcgccaaaaggattggggtaggagtgggagaagcccagacctctcttgctcagcctctycttgacctgggggccagtcctgcttaggattctctggccttgacccctggtcactcctcctttgtgccttgagaagaactgaccagaagtgacccacccaaggccattctagaaggttctaaggaaacaaaaccagggcctatgattcccagcccagcaccctttttccttttcttgctttttattgctctttgcgcgtaattgtaaaaatgcctcctgctttctactgcctcttgatttctccccatctcagctcttgctaacccgacccattttcttttctcatgcatggatgctgctctgagaagctcccaatcgatgcatttgggaagatccccttgcagggttctccaactgcacctcatctaatagagttaacatttcgttctsattctttccttgcatgagccacagcccctgacttctgcatttcctggctgggtgacgttagacaaggaagatacttttcctgagcagggataattatacccacttagcaggcttgtgaggcacaaaggaggtggcttgtgtgactgtccctaatgcagtcgccgctccatgccacgttccatccttcccacccacccccagctcttagagactcaggaaaaatgtgaagattttttagtgttgtttaacaatcatttacattttcagtgcaatcaaacttgtagtttgatttagatgagaagaataactgccaaataaactaaaaatggcacggacaatgatggtaattgtcggcagcgggataattgatctaattacacaaaggaaagcagctccccgatgagttgagcccgtgggctcctgcaggcagcagctcaggccgtgtcccaggtcctgagtggctgtaagaaaaycagaagtttcaagacaaggtgaggagacagtcacgggagcagcatgtcttcagrcggaaattgttccaatttccccacaaatgatcactgatgtgtattttgctggactgcctctggagaacagagctcagatttggaatggtttagatgctattttattgcagctgtatttactgtttgctttcccagccatggtgaggaaagtggtacattcccaaggcccaagacagaggaagtgatttacaaacctagcccaggaagggccaccctgttcatcttgggggaagacccgaagccccaacagggytcccgggttgaaatgaagctgctaatggatgagtcttgttggtttcgatcctgacctctgtttgcctgtggaagctggcccaaggggccagtggctttgctcaggacagtctcatcctggccagcgaagagggaggctgccctgcttggcctctgctccctacacgctccctacacactccctacgcacatcttagtcaaactgcttcaccttgggcctaatgaccactcgttccatctagggaggcagtgagctttttttttaaattgtaaaaaacacataacctaaaatgtgccatcgtaaccatttttaagtgtacagttctgtagagctcagtaccttcacactgttgtgcaacagctcgccagagctgcttcatcttgcaacrtggaatctctataccgtttgaacaataactccccatttctccygccygccagcctctcgtaaccaccattctactttctgtttctatgagtttgatgcttttagatacctcatataagtggattcatatagtatctgtccttttgtgactggcttatttcccttaacctaatgtcctcaggctcctccatgttgtaacatggtaggatttccgtctttgtaaggttgaatgatattccactggatatatgtactgcgttttctttctccattcatctgttcatagacatttggctttcttccaccagagtttacccttctttaacawgtactgagtacctactgcgtggtagacagtaccccattatcttagtgctaaaatgtgtactcatggaggggcagtatgagtgaatccgagtacctgagaggaaagaaaacaaacgccgtctcccactgagtgaaaactaaatgtggaccaccatcatagccaccccataatacaacagcccatgtttactgggcccttaccatgtgcctgacagtggtctgatgtctgtatttgtgtctccatcttatgtgatctcattcaatcattaacaaccctatatgcagaaaccttcyccatcaacttaacattatctccagtgaggaacggaggctcgaggagattaagtgacctcccgagatcatgtagcaggtagtggcagaaccaggattcaaaccctggccatctggctctaggttcctgaactgcagatgcagtagttagactgaaaaacctcaaacgggtgctgtgcttctatttcacctgcagggggccaagattcttttcccagggtagtaaaacgtccccgacaccacctctgccccatggtctcgagcaagccgtagatatgtggttggtttcccagttgcagaatgtaatggaaccctgtatgggtgtcaggctgaagagggtcatcccacaagtattgagcacctcctatgtgctaggtgccggggatgcagaggtgatctagaaggcaaggccctgccttcagtaaggggagctttttgaatacagggccagggaagtcgggggagggagctccaaggctacctgcagtcactggagtcttggacaaataagccctggtgttcagaatcatccaagctggtcccagtacttggtagaacccaaaaattttccattgagtcctctttggacagttgtataatggacagttgtataagaaggtgtagggctgagagcgtgagaagctgcttgattgtctcaacaggatgatgatgagatccacagaaagacacccatggacacagtaggaagtgaccaaggacgtggaaacatgggggagggctgtgcagtgaggacagtgcagtgcactgctgggtggtcactcctggggtccctggattccccatggtggtaatacacagcacagagtgagagtccagaggaggagtccacctggcagggaagcttgctttgccattcctatggggggtaatgtcccccatgccaccccctgcccccagcccagtgctccagagacttcggcctgtccactcrccaggagcaaggaactgtacctgctaaccccagctcatagctgaggctggatgctgcaaggtcacacgcagacagacgccaacctctagcctccccacagaagtgaactgagttaaccatgagcccctccacccctgctttctatttatttccactgccaacatccccctagctatgaagtcatcaccaggccgctaccccctcccccatctccagaacaggagtggtcatagcatcctcattataatgactgaatgaaagaaacttgaagcatctggtcctgtgtctggcacttaaggaacacacatgtagctctcctttctctcatcctttggctgtttgcatgtgtgtcttggatctctgtctgtctgtgtctctcttatctcttcatggaattctgggaaacactcagaaagtggtggttggtgagggcacattcatgtccagtaatagytgatggaaatggcagagggctttgtcaagttgacggggaaggtttctgcatgccttgcttttggtggaagggtgagcgacttcgcagagcctagagcgggcttccagctgctcagtacaaatccccctgaccttcgcgccggagscgckggcaggtattttccacttcacagcatttcttttaattctttcctgattgatgcgtgagatgccagtgtgaaggcagctctgcccctccagcctcggcaggatagctagggatggattccaccactgctctcactscccccagcatccctttatcctggatcccggggtttctcagcaaaggtttgaggaatttgactttccttttgggagcaggagtcctggggaggtggagaaggtggtgggaagtaagggacagcctccttgcttttcatggccagagttcactagcaaaagtggggctgccttgcctcactccttgttgctcagaaagatataccagagagtcagtttaacagagaaacagtgttacgagcaatgggtaagagatgtgggtaaagaagggagtggaaatgtaatcattttgaacctaaggaacacatttgagttaaaaagtccctgagtacaaaaggggtgctgtgctcgtgtataaaccagggtgggcccattcaggtatargtgacagagagttcttctgccccgctccctgtatagttgcttatgtaaattcagggtgtttttctctcttgttgcaagaagtcaaagttggagttactcttttaagtcagcagctcaaaaatggcagagctgaagtctctatgattttcttagttttttcctctggttccaagatagctgctatagtgccatccgtcatgtctagattccaggcagcagaaagaaggaaggtaagcaagacgaaaggggtagttcctagacctagaaagcaagactttcgaacaaaccgtaaaagatttctgattgcaattctttgcgtagaactatgtcagttggccactggtagggagatttggaaatttggtgtccacctcgaatcaaatcaaacaaatgagtgaggaacagagggaagaccagatgctgggtaggtaattagcaaccctgctgtagcacttcttttggattaaatcaaagtctagccgcatatcacccctccacccacttttcctctttttttctcattcattttctatcttttttccaagtgatgcatcaggctccctactgctgaggtgcggtggtcagcctgggatgaggccctgggtctgtcttcacagactaaagatagtgccttgacctgagcacagcactcaggctccgtctcaggtggccacagtaactttgcatagatccagtcttatcatctcrtgtcatctcctatgaagccaactatggcatgctggcagagctcagcgtgcatgcggtgactcttcgttggcctctgtggaatttgcaccgcaggacattcccagccccagacttactgcgactggtctcactaacgcacaagtagcccctgccggctttgctcaygggatgttgggatgttgtcctcagccagtgagacacagatacacactcacaaaccatcttcgtgaccacagtggggggttgctggtttaaagccagagacagtggaggagaaaggaagaccaaatccttattttttttgttgctgtttactgtctttctgttcaacaagctttcaatgaccccatctaggtgttaaggctacagaggtgacagtcccagktccctacctctagttcatacttcagaagtttcaatgtttctaagatatggtgttccttacaaaggcacagcatgctgggaaagaccttcaggcatcgtctgatcaaacttcatcctttttttttttttaaattgatgaagaaagcgtggcattgggaaattgagttgcttaaggccagaaaacttggaagcaatggagcccagcctcagctccgggctgtcagcccaagcccatgctgccatcccagtttgtttttcctgttacctaacagtcaargggaatcatatttcctggtytagcaagcatcttcaatccactatttgcatgtctttcttctcatctctgggagcgaaacaaaaagagtaaaccttaaaggttttcacatccttcaccctaaatgaccacttacgcacattttaagttattgtcagcgatttgtgttttaaaatacaagccttgctatgtttagctaattctcctgggtgagagacatgattgattagaaactttaacagccgttcatggagagaagtataagtctttcaggatcacgcctctcacccagcctttgttgggaatggagaattgatctgggagccacagcacttctttcttccctggcagatgaaaaaaaaaaccctcgagatcatttgcaggccagccccgctcccatgttttttctctgaagagcatgggagaaataatgcatgttccatttcacagcttggaaaatcagcagtagttgtttcagattgctggaattttggaaggattttctctgtacttttccaagtgccccatgtgtttgaatacccaggtgatggtggcgctggctacctagacagcttcttccaccttcacgctctggactccgatggctggacttgcattcttgagggtccccaggctccagtgtggtgtgtcgggaacatagggagaaccttgctcaataagcatctgtgtctgccttggctcaagctggagcagggtgtccaaggcagcctggacccgaataaagacacgctttatttccccttcagttgacggagggggattttgaaggtagcaggggaaacagagtgagcagtgttcagggacgcagcccaccttcctgggtagttttccactgcaacagacccgccgaggccagccagccaaggatactcagagttttacaagcatgctgtgtggactggggcgggggctggcttagagccccctatgccgcccccaacctgcagtgcctcttggtgaggagaggaggcaggatgagcgtctgcaatcattgccatgacaaagtaccagaggccgagggacttaaatagcaatttattttctcacacttctggaggctgggagtctaagatcaaggtgtggtcagggttggtttcttctcaggccatgagagaaggggctgtcccaggcctgtctccttggctggtagatgcaccttcatgttcacacagcagtctccttgtgtctctgtgcaaatttccccctcttgtcatgataccagacacattagattgggaccccaccctaaggacctcattttcacttgatcacctctgtgcagacactatctccaaataagggtactgtctgaacgactgggggttagtacctcagcatgtgcattttggagagacacagttaattcatgacagcgtgtaccttacattccatggtgtttatctggagagggggaggtagccctggggaccgtaactctggcacttcctagcgccttgatgattggcttttctcctaccttctgcttccattctcctcctcccagactctctcatccaataacccccgcatctgtaccctgttcgctccataataatgataactactccttagtagttgcttcttaggtgccaagcaaagtgctaggcattttatttttattaactcatgtaatcctcatgatgacccttgaaataggctctattgccgttctcattgtataaacaagggaactgaggcacagagagatttagtaacttgcccaagggcacgctgctagtaagtggtgaagctgggatttgaacycaggcagtctggctgcagaggatactttataaaccacttctacttcacttaatagrcgtaatattccacttgaagcccttcacatcttaccaagggctcccaaaacgttctctcacttgatctccatcaaaaaagagcaccattggaggggctcagaggaatgggttctaacatgkgatgtgtctggatccgtgctcaagractgggatgatgccatggataagagcacagctctgtgttctgcatcacagactctgcattgactagctgtgtgactttgggcaagtgatgtagcctctctgtgcctcactttcctcatctgcaaagtggggtgacagtctcttagggttgtttagggaggattccttgaggggctggcacatgataattgctcaagacatatgatcgttggtgataatattacttctccgtatctctaagagcttccggggatctccaagagccatcactgccccgatcctccatccccacagtgcagagctgtgctgctcagggtggtagccctgagctccaaatggctgctgagcacttgaaatgtggcgagtgtgaattgagacatgctgtaagggttaaatacataccatattttgaagaataagtaccaaaaaatgtaaatgatctcatgaataatttttatattgattttatgttgaaatgraaatgttttaggtatgttgggttaaataaagatatatyattaacattaattatggccaggcacagtggttcatgcctgtaattccagtgctttgggaggccaaggcagaaggattgcttgaggccagaagttcgagaccagcctgggcaacatagtgagacccccccccgcccccaccatctctacaaataatttttaaaaattagctgggtatggtggcgtgcccctgtagtcctagctactagggaggctgaggtgggaggattgcttgagcccaagagtttgaggttacagtgagctatgatggcactgccgcactccagcctgggcaacagagtgagaccctgtctctaaaagaaaacgaattaatttcattcttttacttyttaaaattgtggctattggaaagcttaaaattaaatatgtagctcacattatacttctattggactgtacygggctagactagaaatgagacgctccagggaccacatctgttttgcttatcgctgtatcccagcacctagcccagatcctggctttacagtagatgctcagaaaatacttgttgatgctgttttgattgtacagatgctctgttcttagccccagaaaggtctcctgggtaccacgccaggaccagaggaaagtctttcgttcccaaagctcagggaaagggctacaggctgggtttttagctcactgggtctctgcggcattgccattgcccacgggcttggcgcaggtgggcccccagctgaatggctgggtttgatggcagagccaccgtcttgctcttcagcccaagggaaaacatggctatggtagtttcttctattttcagcacattagagaaaccaactttgtatggaggacatgaaagctcatttcataggccagaggaggcccgtgaaagagaacactgtgtgcaaacagcaggagagaaagacccgaaggaaatttccatcccggctgaggtcctctcctggacttggctgctcacaggagccttgtgaagatagaagtgtactccttctatcccaggccctttttcacacccccttcttctcagaagaaaatccgaaacccagctcttgtaaaggggtgygtatctgccattcctctttgaccttacatttatgaaaactgagtctagctccacctgcaatcttgatcaatcccaagatttgaggccactgggtggagcaatacagggaaggagttatagttaaaggatgctggagttcaaaggggtcttagtctaaactacttacatttggggtttctgtggttctcatccttctgtgacatctctgctgctattgagggctcagcatgcaagagaaatgagcctagatgaccacatcctcagctcgatccactctgtccacttccagactgccatgagcctgggaagggtgatgtagctgaatctatgagaagagygattcacctgtgcccaaatcctgacatagcttcgcctgagttctgtgtctctgagcaagtgacaacttctccgagactcagtttcctcatccataaaaacggaaggagtagctcttgcctcatttgtcagtggggttaaatgagacaatatgtaaaaagcagcaaacaggccaggcacagtggctcacacctgtaatcctagcactttggaagggcgaggcgggtagatcgctggagattactagtgtttccacctccttaagcccaggagttcaagaccagcctgggcaatatggtaataccccatctctactactactactactamtaataataataatacaaaaaattagctggatgtggtggtatgcacctgtagtcccagcagcttgggaggccgaggtgagaagatcacttagcttgggaggttgaggtgggctttgagtgagctatgatggcgctgctgaactccagcctgggcaacagagtgcagtggcaccatcrctgcacattttaaaaagcagcaaacagcgcttagcatgtggtagacatttaggaagcaagagagccccttctctcctgggtcctgagtgctagtttttctgtctcactctcctctgcctcctgatacacagcagtagtggtgaaggtgctcctgtctttgaccaggacccgggatgcctggtttcctagcagccacatgattttcaccccagtttaaccatacccagtgatggggtctcttccacaacaaaatttggataaagtattctggaagttggagatgactagtgtttccacctccttgcttttcagaaaacacctgttctttctatttgtgtcaggattagaacatggaatcttggcaaaaagaagatgttacttttaattaaacatcctgagcctcgtttctcagtctgagatgaatcagtgagctccatctgggtggaggtgaaggagagcaggaaatcatttttaatagaaatataaactctgatggccacaagattaaagtcaaggatacgtgttggtaacaaggcacctggcacatagtaggatctcagtgtatgttactttcttatccttgatgtcacacctgaagcaggtcagcaagcaaaggaaacgggctgggagtccaagatctgggtttgagtgtcagcacgtcctctcattagctgtgtgccctcaggaaaaccacttaacatctctgagccccacgtttctcatcttaaaggctggaaataattgcaacttttacctacctcgtggggtggttgtgaggcttgaatcatcaaatgaaagggctttgtaaatggcagaactccatagaatggtagttcctcctccttatcattgcggttagtgataattgtgtatctttttcatttgacttgggtaaatattagccaattcccagtcatgactcaaactagayatttttcaaatgataacgatttttaggccatttcctaactcttgcaatgaaatatggatcgtgtttgctttctggagtcagaaattcagattttttccatcctttattcctttttacaactgatgtgtaattcccagctcaccaaggtaccagatgggagatcaggaggtcttttgagaagaaagaaaaagctcattgaaaactgctgatatggaatgtttatttaatttcagaggaggagggtctgtttttgttttttaggtgtaatacaagtagggtttattgctgtttgagcttttaattgatttactaatattttttatagcttcttattttaatgtttacaggtccccagatgctgagatttactgacctccgtgaaggaattgataaatgatttagttgaaatagcaaaactggaggcattgtgtgaattagaaattgtgccacggagcccactcaggtgccactaatttatttaatgtgatttggtttgtacagctgttcctcaccacagacaaaggaaaaacaaacaccaactgttcccctagaaaaatggggagtgccccgaggsattgggccaaagactagggagcacccgggaggatccagcaggctggcctgtgttgggtcagtgcwacaaggcttccttccagaggcctgggcgagccctgtctaacctactccatcctcacctccgtgcgacttccatctcgtgacgttctactgaatctgtgatttcgctaaggttgatttcagtgggtttgttttgtgaatactttttcttctctggcatcatcagagatttcttgcaatttttaaacttttttttgtaggtatgagacaaatacttgtttagtatagaaagtatagaaaataaatgcaagtcaaatgaataaggtaaaaatcaccagcaaatccaccacccagagataatcattgctaacaattttgatamatatctttccagactttttctctgatattcatgtttgtattttttaaaaaatgaatactcctagcttatattgtttggtaacctgtttttattcatgtgtcatttttgagcagtttttctccataacattcaactgctttgcttagactggtgttcaaaggsggctcatacagaccaaccctaatttaaaaaaatcttactaggaatggtttgcccaagtgcattgtgccrttgtagagagctgtgcatttctgtttgggtcgctttaatgtcatttcaagggcactgacataataagaatgcccttccccctttctttagcccatttaaggtactttattaacaagttcccaagggtgactttgttattcttgttccctttcttccacccatccatctgttcatccatccatccatccatccatgtatggagcaattaggctgtgccaggcattgtgtctgctgataaaaacacagatacataatttcagcagcccctgtccactagggtaccagtctccatccagaacttccatctgccctggacatgagatagggacctccatcttatttcttcactatggagttgattacttccagcgagctatctagcagataattcctccctttacagtggaggcatctcaagggtaggaactgtatatcacctctcttctataaaccgcgaaatgctgactgtgcctgtagcctaatactcagggagaccacgaggtgaactgaattttagagctgagggtgaagcggcgggaacatttttaaaaagctgtttctcaacacaactcttatgtatgtcatcgatcaaagaaaaatgaggatgctaacaaaaatgttctttgattacttaagactttatttttctaagtgtggtcttcttaggtctttgagagacagcaaggcctttttgttaaggtttagacacattttctcttggtgtgttctagagaagcacggctttatgtaaaaatgtaagatttatttttgccagtaaaatataacacacagcccagcccagcaacagcatacmtcctcactggatgccagcaacagtcactgtgaaatgttacaagtgcaaacagccccagtccctcctcagacagagcatgctgcccatgccrgcaacagtcactgtaaaatgttacaagtgcagacagccccagtcccctcctcggacagagcatgctgccctttttccagggaagtggggttatttctttttatggtgccattttgacttcctaagactaccatagatttataaggaaataattcctccaatgggcctaagtgacatcctaaagttttacacgagccggttatgaaattgsaagaactgtttcatggaaacatttccatgtcaccaatgtaggcccatttattaaatttatggaacttgctgtatgtgcttttttaaagataccaaaatatatttaataacctcaacccggaggcaaacctcgagggttaattacagtaatgaatgtggccaacacccgggctattcaggaagagagagtggctctgtgctctgcctgagtgcctcaccttgtgctagcagactcagggggtaactccataaactttcatcatccaacctcttcccactttcacctctctaggtaatctggtcactcttggatgaatagcagatgtatgagaataaccttgagatttgggatcgaaaggcctgactctgagatctgattctaccccatttattatktactgtgtggccttggttatgtcactgtcctactctgggcttatttttacatctataaaaggccagcatactaatagcactcatctcaggatttgaggggaaacagaactttgsgaggagcaaggagcagcatggaagaaaagaagagagtctagtcttaaaaacgtttacaaatgtatcatagtccagaaagtcttgtttcaaactgtgccatctgcatggaggtagttgaatgtaacagtgacaagtgcaaatcctggggtcacgctgcctaggtgtgaatcacagctgaatctctttttcctcatctgtaaacttgggatcataatgactactcacagggcggttctgagtattaacttagttcatcaacctaaagtgctttgcacagcatcgggtacatcatgttcaataaatgtaagtagttgtatttctaatttttaactttttatgsctattgaaaacttgaacactctgcatttaaatttgaaacaacatacttggaattttctctggatgccaagcaaatgtccatgatttgtggggtggggggtgggggtctttcttttttctttccctttctctttctctctctctgtctcttttttttttttttttttttttttttgagacggaatcttgctctgtcaccaggctggaccgcagtggcgcgatctcggctcactgcaacctctgccttccaggttgaagtgattctcctgcctcagcctcccgagtagctgggattacaggtgcccgtcaccatgcccagctaatgttttgtattttaatagagatggggtttcaccatgttggccaggatggtcttgatctcccgacctcatgattcgcccgcctcggcctcccaragtgctgggattacaggtgtgagccaccgcacccggcctctttctcttttaatcttatttagactatcatgtrtagaattaagattgaatactttatttaaattgctactaattgcaagttctgtttggtaggggtttagaatatgcttagcatttgaaatgatcacgggtataggttttctgtccctgaaaaacacctgaactgtttccctcaagctttccaaaacaattcaactttggatgcaagcgagaatggagaaatttaataaagatttttatttgttttccaaaatgcaatacagaagattggggttattgtgaaacgtgggcaggcttttgtagtcccctttaccttgaattctgctttgccaaagcaagattttattaagataggactatccaatttccttccgttgttcttgggactctgtgtttttgcaactcgtttgcctctgtctgcgtgttgaattctagagggtgcgatgatggaagaataaaatgggatggaataataccagtgtcctgctgcattggtattcaaattcagtatccaaggctccacatgcctgaaatacagatttactctgaaatacagtggatggccaacaaatgtttcctgattgaaaaaagatggaaggaaagggaagggagagaaggagaagctagggaagtcctgtgtggaacagtagagctgggatcaggtacctcatmagagaggcggggcaaggtctgataaccccttttttcaccgttctacagtaccgtgtgcggtggggtctggagtgagccagaacagataagtcgttgccccttgccatcccccaaaactatgcccagggtagctggccaggactctgtctgcatcacactcctgccagtgtatggcatggggcctggcaaataggaggtrcctttaaaacgcttgttgagcagaacattccagttgacctgatagttcttcatgaacatagtcattcattttcattgacagaacttatgttaaatgatacgaagttattttgagaggtaagtgaccctgaccctgtccacaagaattattcagttccgtgaatttggtccagcagagtctggtttttaacagtcatttggcctgagctattgactgcaaacttttaagattcttccaggcygtctcattagaagttgacagcactttggcaccacggagacctacaggtgtccttattcccccaccacgcttctggtaatgagaaatgaaagtcgtccagcctcactcagctcactgtgtgttccagattacacaccaaggttgtgcaatctagccttggttttgctagatactgatccggctccagataaatgtcattggatgacaacatatatgttccttaaaactccagcttttggagtttcatcccagtccttaccttgcatctcaatcagggacagaattttggccgtcatttgggaaggagccaagtggacacaggatggttttagacgagtggtcctaactttttcatctgcatttccatccagtgttggagctaggacttccgcatgcatccagactctgctttctgctcatttcatgaccttaggggagcyatgaattcctctgggcctcagtttcctcatcggtaaagcaagcaagtcatggacctacctcaggctggttgtgaggatggaatgagatgctgcctgtcagcttcttagcaccacctaaggtctctggtgatgctggttattgcagctgcacatccaaagcacctggcgagctttcaaacaccttagacacccagacccacggaatcagaatctctaggggtatgcacccatgagttcatggtttttaaaatcctcagagatgatttgtgtgcctagtcaggattgaaaccactaattctaaaggaactggaytcatggggttttgtctttaggagggagtctagccagtagagccaacccacagaagctggagtaagaatacttgggttccaatcccggtaccacccctggcttacccccacaccatatacccctggctgtgtgaccttgagctaacgacttaacttccctggaagtcagtttacacaataagaaagtgaggacagtatttatgagcacccctcatagggtcatatagggactaaatgagattatccatgccaagtcttatattaaaaagtgcctgccacaaaggaagcccccaggaagcggtgagcacatgatacatgttaactcactctccagaacaaccctgggtagtagattatgtcattatccagtttccgtatgtggagcatctctgtaactcctctaaggtcacgggtgttaaacccactcccgagacaccrtgacaacacagaacacactgcgttgggacgtcagctgggtcagctgaaggacttgtgagtgcagctccctgagctgcagctgaccacacaagtgggcaactgaatacagtccccataaagcatgtttatcttatctggggctggagattagctgtgttgtgcagaagggaagaggcattccaggtctttccagctgtcttgcctgtgaacatttatcgtcccctagttccgacgtttattatcccyccgggtggatagcactaattcataccagtctgtcygatggcagcaacccccatagatgtatgggtcatggcggaagagggagaaaccccagactcttgctatttggagggaatgagattctgatagtcacagccctcagcraactgttctctttggaaccaatacagttgttttcctgtaagaacacagagaagacccaggcaactctgggttcyagaaatgaaggcctccttgagaagccacattaaccctgacatttctttctccccatttctgtgggcaaggaacacggcccccaggcaactctgggttccagaaatgaaggcctccttgagaagccacattagccctgacatttctttctccccatttctgtgggcaaggaacacggcccccaggcactgaggaagtccccactgcagcgtgcgttagacgtacgcacccctctgcaagcacaggctcgcacaatcgcccgctgtgtctcctgccagccagctgggtgaatgttcccgggcagccagagcgtttttcctcccctcctcacactcccctccccttctcctgccccgccagctccacgccctcctgaatgttccattctaaacagccacaatcaggagcctgttctgcactgggaaaaagagcagcatgaaggcttttaaacttgctgggtaatttaaggtatttatcgctatttggagagctttgcttgttttgaatccattccccctscagctctcagaaatggtgcaaatgattttttttcccccttgaaaagggatgcttctaggtctttccactgtccccgaggcyggattctgaatgcaggcctccagacctgggtgcattcgctgaggttttgttcattcataaacgttaattgggcatctccctgctccaggcctacattgtgtttgtagagtgctccccctttctgcagtggactgtgtttctaactcatgcgcagtaaacgaggtcagagagcctggctttgggatccaggctgacccaaggtcaagctgcgccctgcaaattarctgtgtgaccctggacaccgttctcagcttctccagaacacagtttttcatctgttaaatgggtatgatgacagctcgtagcttacttgctttggaggccagcctgcccgtgtccagatcccagctctgccacttcctcctcctgtgagcctggcttttccgttttgtcagttgattcaccttcagtcaggaataatagccaatccctcaaaaggtggcaagagaactgagttgatgcatatcaaatacttgtgcttagcacatagaaattgctcaactcaacaaatgttagtttagaggaggcccttaataaatctaagttcccttttcccctctcgctttcctaaagcttcacctaagccaacagctggacagaggcggaagcttgccaagagagtcagaaraatctggactccacaccgcctgctgcagggcctgctggcctcacagggagagggaggaaggggggtccaccctggccaggtgcactctggtgagagcagcccacagaggccttgtggtctcccaacttcctcagtccttaggatgctaacagggctgtagcagagcgagtcctcaaaaccaaggggcttccccaccactctgaatccaccagcaatctctgcctctgcacggcacccagggcagggtggtccttcccygcttttctattccagaccgtccatgaactgcctccatttcctccacccacccccaacatagcctccttcatggagcatatacacatgtgcaagtgcatatgttcagacccccccacacacacacactcayactcatacacactcacacaaacacatccatacacacatgcactcacacttacacacacactcccacacatacacacccacacatgcactcacactcatacacacactcccacacaaacacatccatacacacgcactcacactcatgcacactctcccacacatacccacacacacacaaatatactctcacacatacccctgcatacacacacatyatacatacacaccacatatacacacacactcccacacatacccctcacatacacaaaccaatacacacccacacatacactctcacacacaccccacataaacacacacccacacatacaytctcacacacactcccacacataccccccacacctatacatatacaccaacagaaacacacacatacatacatgcacatacatgcacactcacacacacactcttttccagctttgtgtttctgcttctgccttttcagtttctttgatttcccacatatggatttcctgccctgccttctgagggtgttgggcaggtgagaagccctaagatcatgttcagagctgaaaacataatcaccagattggaatactggagatgagatggtagagaatggctagttttagcttttctcattaacacggggtgggagcagatgaccttttccttttagctgacagctagtctgctggccatgggcacaccctcctccrcaaagcctcttgtgatctccagtctgactggacacggcttcttgctgcgcccgtgatcctaagcatggggtgtgggtggtagggaaaagcctggagcagggctgcttggttgaaatcttggctctgcaagttatttggttttgctgtgccttcatttccccatttgcagagtggggtcagtatttgccctgattcttagggttgttaagaatattcgatgaggagagccacatcaagtgcttggaatgcctgtctactgatcattactgttaccagcgcgatcatggttttgatcatggaagctcttagcccactgcactgtgatcggtctaggaagtcctgtcgcttcccccacaggtttcgcagcaaacgggccaggacagttatctcaggcagcctagagaacgcctacagtgtgagcaaagccactgtttaaagtgaggtgatactttattcaccaaagattcctttacttacagaaagtcccccttgaacttatgatttgaattttagacattttacccaatctctatctttctctctctttttctctctctctctgtctctctctcctccccgcccccagccctcttcttgcataatgtgagaagaggctttcaacagccaaatggaaaccccctttgtcaccttgtaggcgtgtggcattgggacactgaagttagcaaatcggccagtgactcatcagtttcctctccataactggggtgtggttgggggatggggcaaaactggcacttggcaggaggccttggcacagttcccaggcagcattccttctgacccgtcagtgaccatgtcctacccattaaggaatattgtaatgatcagccctggaggaaggagcattaagatttctgctctgacttcagatgttttgatacaatttgggtagctcgagttctccatccctgacaatgaaaatgcccaggaatgtcagggaagcgcgttttctggaaacctacctccctgagacctgtctggcctgcacaggggggtggaccgtgtgggagagaggggattgtccctctctccccaaggtcagctctggcttgcggagtaatggctcgtgtgagtgatgtgtgtgcaggactccattaggggcccggctgtccagctgtcttgtggcaagtgtctttgcagagaggggcgaaaggagcagatagctccagaaatggagaataaagagaccattgctttctgctttctggcaaattctgccaaaatactgcagagaatgaaaaactttgaaggaaaacccctttatcagctatcccatgccttgtggccattgattccacgagcaggtgtttctgagagctggaagctggcctggccctggcctctttcaggaatagaacatgtgaggatggttggcttcaccacctccaaagggacctcgggaggagtaacctcccaatggggcaagattactcaccatgacgggcagctcagtgcatggcaacaagcgtatgctctgctgggcagccttcttggctggaaaactggctcgtgattctgactgtgactctccctcctacactttccaagccaagagcctcccccagatttcacatgcctcccgcatggcacctctgttctcctgctgccaccactcagacacccaggcgtgaggattactctgaaaccctgatgcttggccatacctgccccaccatttctgaggctgccataatgaatcaccacagaccaggtggcttaaaacaacagaaatgtattctttcccagttctggaggccagaagtccaaaatcaaggtgtcagcaaagctgtactccctctggagactctaagggaagatttattatttgcctctcccagttgccaaactccttggcttggggccccatctctctgctccatgtacacgttgctgccccctcttctgtcttcttttttgtctcttataaagacacgtcattaatatttagggcctacccacacactccaggataatctcaagatccttagcttaatcacatctgcaaagaccgtttatccagagaaggtcacattcccagattctgggaatttggatgtggacctatcttttggggaggtaccattcagcctactgtacctgttaatggaatggtttgttacatggattaacactgacttgaggctttctagggtgagcctagagcattttctcaaaaatacacatgtggtgacacctatttttagctatttgacttggacaagtaacttaccctctttgggcctcagtttcttcacctgtaaaatgggaatgataatagtacctacccataggtttgttatgagcattaaatgagttcatgtaagtacagtgcttcgagtgctatctggcaattagcaaagcactccataaatatcaaccattcttatggtgattatcatcatggcatcataatcatcattggaagctaccccaggcaatgagactgtcctagacaactcatttaacatgtagcacagcacattcacaaaccgtttgtttcgacttttcgacctacttaaaatcacttgraatttgttgccgtgtgaccttgggcaagttccttaacctctctgagtctggcagaacattccctggaagggctgctgaaagattaaatgtggtcagcctcgtgacacatgttctgcatcaatccacgttggctgagcagtgagaaggcagcatgttacagtcttgcctctccacagacgttggtggcatctttcttscctgcccgtgtctttatggcygctcggttttcctctgctgtcagctctcccggcctctgttgaatggcctgcacttagttttagtcgatttcctcccctgagtctgatttctctgcrgtttccagcacagataaggctgtacatttcagactgcggtcccagagcaggatttttttgctggcttctttggggaggatgtttgttaatacagaatcaaaccttagctgttctgctagtaaaagatttccaggtagattctaactttgtgtgtttaaaactcttagctgttcattaaaatgctgccttgtttctctcagtggtctgtcagagtgatccgaaccagatcactaattctacgacaaccagtgtttctataatgataaccaccctgccatagcacttactctgtgccaggcattgttgtaaggactttatacttaatccttgcatcctaacgaggaaggtgctgttacaatccacattttagagatgaacaaacaaacaaggcccaagaaacaaaaagtgttcagtaacttcttgtccagtatcacccagtttataagtggtgaagctgggattcamacccaggccctcttgagtccagcagctctgctctgagccaccacccaggactgtccctcattaaatgcctgaataatttcgaagagtcagagttccataaatgtttatagaattaattgaatattgaatggcttttcctgttaacggaggaatctcagtcagtctttgctaacggattagacttttttttttcagcccctgccttgagacaagtgtagatttttctctcactggttttgcagttctatatctaggatataatgcccttgwcttcttgcctgtgtatggtataaaaaggatggtctttcaaacccagatacygtgtaacctgggcaagtcacgtaacctctctgagcctcacttttcaggggttaataacatttaacgcattaaatgtgctaatgtatgtaaagtgycgggcataataacaggtcctgatacatagtgacttgaaaaataaaatacaaaatactttgcatttttccgaagaaaggtactgcgtaactcttaaggtatatttttactatatttaccttgctgtggtcartctagtrtaggtgtctctgttatattaatgttttagtggtgatcactctaagcagttacatrtattaaaatattctggccaaatgaaaagtttataaagaaatgcttttaaaattgaaccagaagtagatgacgatagtcgtcattattttaaaaagagaggtttaccgttgaaatagatctcattaaggacctataattgacagaaattacttcagcttctgttatgctcacgtcttgatggcagcatcgaatacactcatgtgccctctctacaagtaagaatggtatggaattgcttcaaccgtagatttgcctttttccccctgggtgatacagactcataactttccaatattcatttttcttattttctcttagctatgtaatgtgagtagggtgtattactatctcctrttcacaggatccaattaactgaggccataagaaataaatgaatgaatgaatgaaccgaactaacaaccgctgttatgagccgagtgcttactcagtgccaagtgctttgtttggactttattcaatccaggggttgaagaaccactcactctggagtcagattcctggtcctaaaccacgtacttaagcaaattacttccctgtgcctcagtttcctctcctgtggaatgggattaataacattgccattcttacagggttgttttgaggcttagatgatacatacatgcaaaaagtccacagcatgctgtcaggctgtaagcactcagttccattaattgctgttgattccttcaaggactctgacagaggtacacccctgttttgtggatgaggaatttgtgctcggagaaggtgggggcttactcarggtcacgtgtgctgtggtcaggaggtgtaggctaaaatccaggtctgactccagagccaaggttcacaagctacatccccgcatgcctcgactggtcaactcctataattctgtctgcataggaaagacctgttcaatgatyatctttttatattgttttgatttttgagtcatgtatctcatttgagcaagagatcagcctgcagttagggcaccgtattggtttccaattgctgctgtaacaaaatgctacaaagtagaggctgaaacaatataaatgtgttattttactgttctggaggtcaggagtctgaaatgggtctcctggggcaagaatcaaggtgtccgcagaaatgagttccttccagaggttccagtggagaatctgtcccttgccttttttagctattagatgccttctgaattttttggctcatggccgcatctcctcaactctgcttccattgtcacatcttttctgactccgagtcactgcctccttttcttttgagacagagtctcgctctgtcaccaggctggagtgcagtggcgcaatctcggctcactgcaacctccgcctcccgggttcaagggattattctgccccagcctcccaagtagccgggactrcagacatgtgccaccacgcctggctaatttttgtatttttagtagagatggggtttccccatgttggccaggatggtctcgatctcctgaccttgtgatcggcctcccaaagtgttgggattacaggcatgagccactgcacccrgcctccctgcctcctttcctaaggaagctgcagctyacttgggaaatccaggataaccttcccacctcaagacccttcactctaccgcagctgcaaattctccttttgccatggaaggtcacattcacaggttccagggattaggatgcggccttttgggcgtgtcattctgcctagcacagatggccattctcatcgtgccagggtgctggcacattcttgtttctataggggctgtgtggtgtgggccccatcccagcccctgcccttactagcctgtgagcctaggctaagcagacatttcatttcttcgcccttctccaaccttctcccgaccctgccccatttcctcctttcctcatctgaagaatagagttttcagtaccagttttgcgtgactgttgagagcacaaaatgaagtaatgtgtggaaagtgcctggtcctaattggctctcaaaaatgggagccattattctcgcaatgattacttttcaattatttttaatgttcctgtaataacaaacagagcccagtgtcttggcctggtcagagggaacaaaagtcttagcatgcaggtcgaggggtccccatggcctccaaaaagcagaaaaacaacaaaacctggttctaactagctagaactggactcagttaggaacaaaagggttattcagctgaccagaggatgggcgaggaacagaaggggaaggtgagtggagattagcttgtcaaacagtattttcttgtgaatgctgcagatcaaggcagtcttttgtgacagcatttatattaaaagaggcccaagatatttatagcccctattggagcctagagcctaaatagcaactctgtttgatcagcctttcacaggtcatgtgatgtttctccttcagggtgtccatttgaaagtgggagaaaccactaggaatttgggggsaatagagcagagagagagaggtagggaaatttggtccatttgcagattcacggaagttcaaatgtggcgcatagctgcgcacagcttcccctcctccttgggtaccatgttgccaagacgggcggttagagattcaatggcagagggctagatgattctgtttccaaggggccctgcttgccttccagccccacctcatatcaccctgtccctcagttgctgttccagcctcttggcccacattcctcaaacatgtcaaacaggttccaccaaaggacttgcatatttgctgttcccactcctggaacatacttccctgagatctttctgtggttggtgccttctcatcaagtctcagatgaaatatcacctccttygagaggccttctccaaccttccaggcactgcttcttgcattgccttgttttattgtcttcatagcacttgtcaccatcagaagtgatcttgctcattaatttgtctggtgtctctctcatcacctctagaatttaaccttacatttaacttttattgctggatatctctattggcctatcttagggcccaatggagaaagaaaaatgttctaataacatattgtaaaggtttgcctagaaaggtatatccttccccaacatttccattcactgaaagaaaacaccttatttgtctggtgtctctctcaccacctctggaatggaacttctaggggaacagggacattggctcttattgactgccataaccccagagtgagacattgcctaacaaatgaagggcatttatgaaaatacttgctaacatgctgcgcttattatgggccacatcctgttctaaatgttttgcatgatttaattcatttagtcttctcaactaatccattttacagatgaggaaatggaggcatagtttaataaatgaaaaacatcaaatgaattagactattcaggtatactggaggtattactgaattgattcagcaattgtatcagttatccgttgctacagtaattctgcataacaaaacaccctatttcttcatgcttgttaaggctgccaaggaatgaaaggacaaggtttttatttttcttcacggtgggggagataaaaaccacattttatattttcagagagtgacaatgagcattaattgagcatctactgtgcgtcaggctctcggttacgtttggaattaaatactcaaaacagtcctcaggagtgtggcattgaccccatttcattcagtttgtgaaacagactgagaggtaaagtcacgtactctagctcacacagtcttagggttattttaatttctcccgctctagctcacacagtctcgccgctatttttatctctcctgagattctccagacaaaaccagctcgtaagagggcacccatgatgtcgttggtactcagtagacattagctgaatgaaggaggaggaaaggccaccaaccgacctgtgagggtggatgttcctatcttcgtagtactcagatgaggaaactggaatttagagagattcagtccaaggtcacctggctagtaaatgatcaagtcaagattccaacccagaaagttccatttccagaagccagtgctatctgagggaagtagaatttagcagtgaggacttcaggaccccaaatgccttctccacagtttacagcccccaccggccaggagagaggcgaagggagaccgagggcatatacgtttgtctgtaaacccgttgggagggtacccaccgaggcctggaaccaattcaggccccggagcctccgcgtcctgctccatatccccctgagccgcagtctcccttgagcagaactctggagtcagatcttcttctttgacctccgccccgtgtgtggtttgagaaggaagagttgggaatggagagagccctcatgcgaagtcatttgctgatgagaccccagcagctggtgaggggggccaggcctgtgtggattttgagtgggatttgtggcctgaacatactggggccgccgagccccagctgcagggacagccagcactatcacctgccctgcagagagcaggcatctttctttcccttttggaaactgccatgtgtaattcatggtagagcacagagaaagacgcaatggagccccgccccatggaaaatcctaattagctccccacagggctgccagaatcatggcaggctcctcacagcatctctgactcttgtcaaagggtggcggccctgactgtccagaggaagaggyctccccacaacaaaacccctctggtttgtttttgttgttggtttgtttttttactgccccaggaatcagggttatctgctggaccaccttataatttgcaaagccccaccaactggtctgctttctttagagtgacttgaacctctgagcattcatcgactcaccaagcatcaactggactcctgctgtgtgcaggggttttgggctaggccccagggatacagcagtgcataaggctgtgtaatccttgttctcaaggggcatactttctggttgagaggacgcaggtgatagcaaatagatatataagaagatacaaggtagtaatagcatgagtgagccagtgggtgttgctcttaagccacgctcttgcctctcaacactggagtgacatgcaaatgccatggggacatctcagggacatactgaggcagagagaagagcaagtgcaagggcaccacagcagatgcaagcctggtggctggaagaagcaaacacaaaggctgtgcaaggaaaccctgatgaatgtggggatggggacggacatgtggccaggcaggcacacaggggccaatctgcggggcctggtcagaccacagaagtaaggatgttctgctaggaagcaccattgcttttgcctactgggcagaagtgcagaagtgtggagcctcccactggtgtcctgtcattcgagggtttatttctgcttattgggtcagtgattcagctcctgcacctgctccatgtgggaaggaaatgcwgtgcactcagtaaagtcagttcctctcaatccctcctcctctggtatgtgcccacccaaaccacgtttgaaatcatcaggtcaccctgacttttaacttataccacactcccccgggttctcacgtgcaagcaaagcttgactagctgggcccacatctttgagtgccccgcccccctgttcctgctgtgagtgaagggttcaggtgaagaaggcatagatgttaggggcagacagatcttaggtttgaatctcagtcttgccacttaatggctgtgtggtcttggacaagtctcttaaagtctctggacctcaataacactggggataayaatatctacttcaaagggttgttgtgaggatgaattgagataataaatgaagacatctagtgcaaggcaagtgcttgatcagtttaaaggttytctcttcttgcagtctcttaccagcctgttgtggagtacctggaaggaaaggtacaacacttctctagtaacacatcactgggtggcagtgagtacagctgggctgtctaatgactttgtaatgagtaacttcatgcattaccatctaaatgataggatacatagaaatagatcatcaataaaaaggaatgcagtactgatacatgctacatggatgaacctcaaaaacattatgctaagtgaaagaaattactcacaaaagaccgcatatgatatgattctattaatgtgaaagttccagaatggataaatctatagagacagaaactagattagtggttgcatagggcttagaaagggcatagacagaatcttttgggggtgataaatatattctaaaattaggttacagygatgattgcacaactctgtaaatacatgaaaaaccactaaatcgtgcattttaaatggatgaattttatggtacataaattatatctcaagctgctttttaaaaaagagatatagtttcattactttcagaaataatacaaagtttaaaatgacatgctaagcctgggcaacatggcaaaaccccttctctacagaaaaaaataaaattagccaggtgtggtagcatgcacccgtagtcccagttgctacttgggagacaattgaagtctgtttttcagtctgataggtctagaaacactcatatacctcttttttctttttgtctgttttgctttttttttttttttttttttgagatggagtctcgctctgtcgcccaggctggagtgcagtggtgcgatctcggctccctgcgagctctgcctcccaggttcacgccattctcctgcctcagcctcccgagtagatgggactacaggcacccgccaccacacccggctaatttttttttgtatctttagtagagacggggtttcaccrttttagccaagatggtctcgatctcctgacctcgtgttccacctgcctcggcctcccaaagtgctgggattacaggcgtgagccaccgcgcctggcctgttttggttttttaaaaaagacactggcataatattttgacaaatgccgaaataatataatgtgggattgggctctactggaagtatatatgttgtacagcactgggaacagcaaattccatcagggagggacaaagtgagggaacaagagtatcaggaaagttttctaaaggaggttgcatctgagcatgccgttgaggaataaaagtgttcatctgtctggccaaccgccacaaactgagtagaggcagcagcacacaaaagaaaagatcagtaatattctataagctttgacctgcctgaagaaacagcagcagcatttgttatggttgtattttagttgtgtccttggtgacaagcaaaccctccctggccatcggacacaagtggatcattgatatcagttgactcctggttaccccagttttggtaacacctgtaatgtcttggcctggatcttggtagtgaaagatttcatctctctggtgtttatggtcttgtttttcaccaaactgacattgggagaatctgagacagactagagatagcaatggtatcctccatatggcattaggatttcacctgtatgatgtgtttctcctgtgaagccacctcattgggaaataaattctgccccatggcaaccgatgttcaatcccagtgacagcagcatagcccggcagaaagcactgagaatcaggttccagatttcaacactgctcctggccttaatgagccagctaccgtaaccgtagccaccgatcaccaagtaccaaccctgtgtccagccccacctgactctctgtccttcttctccagacttgtctaataggggtaaactgtacttatcttcacgggagtgttatgcattcaaagacaaaagtgaagccactttaaaagatgtacaaacctcaaaagggaaactaacctttgcaggaaggaagaaagtgttgaaatggcaaaagggggcggggtcttgagcaggaggtggaatggagtatgattgggcagggggagaatgtcaccaatgagcagggtttgacactttcaggcccagtatccacctgctcagtgcgagacaacccagcagtcagacaaaactaaggcagaggcttcagcaaagctggacacatgctagctccccaccccaaaacagagagagagggaaagagaaatcatttatatttataaaaatcatcaatgtagtcatcataggaccagtaagaaatgaggccgggcttatacttactttatggtttcaccttattttcacttcgaatcacattttggaggtggccctatggttttgttagggtttcagacctctaaaggtctaaatccagctgtggctacactgaacaattttcctgtartggttgggagcaactttgtggggttgaaatatggtattcagaaatatggatagattttcccaggaaatagtaagatatgagattcccctttcagccaccccagaactgatcactctcatggggcagatctttgatttgccgacaccagattacccacctgcaaaggaaaatttttaaaaatcatgctttgaacatttttctttgacatttgaattgtatcaattgttacatcccttgggcgcattgccgggcagtgagtagatgccaagaacatctaccaggatgaatgaaggaatctgtcggtgaataaatgaatgtgggagtgaatgcatgcattcacatctatgggaaaattcactatgattagattcacctctgaactcagttccatcatgctagcatctgttagccaagtaacctaagctagagaggcctggagtcctaccaattcagtggattagaagggcagagaggtgaaagaatgttcccttaatgcttagcacttgactgtaagtgcacactgctggcagaatagtcagcagtggaaatgagggaggagcgaggagatgcggcagaactagcagcggggcagagctccagatccccaagatggtggcattatttatgagaaaggactcctcttgcaaaactgtgcgtagacrcatgggtgtggctcttcccccaaaggactggctttcctttccttccttcttgaaggattacagaataaataggaattggtacaaaatgtggatggatggatggatggatggatggatggatggatggatggatggatagatgggtgagtgagtggatggatagatggacagataggtggatggatgagaggacatctacacagggtggtgaaaagagcattggccttgaatggcagagctactcagcttctttgagcccaactctatcatctgtaaaaaggggatggtacaccctgcccctccatggctccaaaggctattagaaagctcaaactgaaagccaagacacctttgttttgtttgatatggtttggtttggtttggtttggttttgttagagacggagtctcactctgttacccaggytggagtgcagtagcgcgatctcagctgactgcaacctctgcctcccaggttcaagtgattctcctgcctcagcttcacaagtagctgggattacaggcatgcactaccatgcctggctaattttttgtatttttagtagagacagggtttcaccatgttgaccagtctagtctcgaactcctgacctcaagtggtctgcccgcctcggcctcccaaagtgctgggattacaggcatgagccaccaccacacccagccccaaaacacctttgttcagtcaaggtgctctgcagctataaggaattattttctatgcaacctcttccctccaaagactgcctctaatcccccatgctgcaaatatattatgattaaagtgcaagagtaagtcaaaatcttagtaaactctatgatcactttggcattcctccaacaaactctgcatggattttgttcctcctctcagctcccaagcaatttttcttacattggaggttgccaagattttatggctatttggttatcttatccatccagatggttagcattaatttatgctgaagtaaatctgcaaaacctcatctgtctcattgctccagaagcattaggtgtaaggcctaaaaaaatcttaatatatagcctcctgagagggctgaggtgcgatgttactgcatgctttttattcaatttggcttgaaattctgctcttctatcccttgatatttatatataagcaaattaggttgtttggtataagaaacctaaacttattttatgacttttaatgcagatgctcatctcaagttacacaggtgctttttattgagaaaagttataccatgatttataccaatgataaattttgaacaccttttctccatttttgaatattcatcattaagacataatgtatgggttggcgaccagggattcaaatactcattaaatgtgtgacctcaggcaagtctctcagcctagttgagctccatttccatcacctagatgaacacttgcctgtaggactactgtgaggattatatgtttaatgtatgtggggtgcttggcacataatagcacttaataaatgctattagggactattcttgttatggttgagccggtgaagaattttgtgtgagagattgtgtctggactttcatttggagcaagttaggtcaaaataacagctcctggcactgctggtgctgaacatgtgttctctgcctattcccttgctgagacatgaattattaatattttatgccatttattcctgtgctatttggggacttctctgrcagactctggtgttttctgatggttccagaaattcgtgcaaaacatttctataggctgggcacagtggcttacaccaataatcacaacactttaggagttcaaagtgggaggaccacttgaggccaggagtttgagaccagcctaggcagccttagtgagaccctcatctctacgaaaacatttttaaaaaattagctgggcatggtggtgcatacccgtagtcctagctactcagaagcctgaggcaggagaatcgctggagcccgagtttggaggctatagtgaactatggtcccaccactgcacttcaacgtgatcacaaagggagaactcacctcttaaaaaaaaaaaaaaaaaaaaaaaaaaagacaacatagtgattcatagggttgacctgacttttcctaggagtctaatggacagctgcttagcygctgatccagcgcttggctgactgattccaggtgccagaatgtgggacagctgtgctctgagagagagtcctctgctcactcaggtgcagaagacagtaaagactagaaagttggttgatgattgctggaataaaggatgagaaacttgaatctggtactaggcccacacaaattcagttactatgtgtcacttcctgttggctatttatttaaaattgtaggacttctggacaagatttgcaactgtggctgctactgtatcaaaagttacaaagtaactgctaagtagagcctttagtttgttgttgttctggtttattttatttatttgttttgtttgtttggttggagacggagtttcattcttgttgcccaggctggagtgcagtggcgcgatctcagctcaccgtaacctccgcctcccaggctcaagcaattctcctgcctcagcctcccaagtagctgggactacaggcacccgccaccacgcctggctaatttttttgtatttagcagaagcagggtttcaccacgttggtcaggctggtctcaaactcctgacctcaggtgatccacccacctcagcctcccaaagtgctgggattacaggtgtgagccaccacacctggccattcttgtttctttttgttttgttttaaaattgtatattttggatcagtttgcatctctctctctctacagggattggtttgagcattgtgcaggtcccaactgccaaggctcatggtccttctgtatagatgccacaaacctacagttaacacagcaacctttctggccttgccaagtgctaagagtggttgcaatagggcctaggattcagaagttgcactgggcagtcagcagggcccatgcccctcaccagctcttctggaactattttgtttttttagcatccaagtgctttacaccttgttctcatttgggtggtcaagccaagggttgttgactgaattcgtaaaagcaccttacacatcagaggcactaagtaaatgtgtataaatcctggacaatacagcaatagtgatggttaataacaatggttctcatttattgagcacttactatgtaccacacaccatgtgaagcgctttacctgagttatctcatctcaccgtccaaccactgcattaagtagatgctgcagtagcccttattttacagatgaagaaagaggccaaagagcttaagaatttgcccatagtcatagctgggaagccagaggcaaggatttgattccagggtagtctttagacaaagacctgggcagtgaggaggtacttcccaaagacctgggcagtgaggaggttctgggaagtgaggaggtactacgagttgaaatgagaagatagatgtcaaggccagtttagctcaagattcttttttaaagaaatggcctttcctgcctaraatgatcctgtttcaaacagcggcccccgccccccccaaaatttttttttccctttgcagctttggattttagtaacaccaacaatatttcctggagaaatactccagatgcagttttctggtacaagggaagctgttttcataccgtaccagcatttcacagtttaatgccgttgggtgagggtggcggttgttattctgtgtttcctgctctcagccagtgtgtggttcacacttgaatttggcaacagtgtggttgtgttttctgtgcatcacttccctgcatggcatcagatgggccttctgattcttagaaaacgcaaagatgtggtcatttgtgtggctggaaattggcatccctgtgtgcgcgttaagaacgccaggctgttgcagcagaggaaaacaatagggaccattttaaaatgagatacaagtgttcaggtgactgttgctgtgggattttaactctggatgaatagcttgctgttagggtgggtactgacagattcctggagctcttgttctgatccttgatcacaaatgctttccgtctagattgacaagttgaaccttcacagcaaccctgtctggtgggcgccactccacccattttatagatgggaagaccgaggcaaggagaagtaactcaccactagtccctgagccagtaggtggtaaaatgagatgtggccccagatagcaaggctcaagagcccctgagcctactgaactatagggctagattgacgtattgggaagtcttctgaataaattgcttcttcctctcacttgttttgctagaaacataaattaatgttaaaacatcaacctgaaacrtgtatttaaaaacctgtaagatattctcaagataatcttcagaaatatgtgaaaaataaaatgttaaggatccttaaggatgttcacacaggtattatttctaataacaaaaaattggaactagacagtaaccaaaataggggtgtggttaagtatattctgtcacagccatataaggaaaatgtatagagcccttaagatgatgttgtagcataaagtttatggacatgggaagatgtcagttacaagccattgctactgggcatggtgatgagcctgcaggcccagctcctcaggaggttgaggcaggaggatggcttgagcccaggagttcgagaccagcctgggcaagaaggggcaagaaggagcaagaggaggaggtgaaggagacaagctattgttaaataaaaatagtagactttttaatataagtattatatgatacaattctttctatatacacacattcgtgaaagaacatttctaggacaaatgtcaaaatattaacagtatttcctttaggtgttatggtctattgtgatgttcttcattcttttgtgactttctcattttccttccaagctgcctgcaatgagtaaggattaggaaaagaaatttttaagaccaaaataaaccttggcctcagccagaatcccttcctacccaacctgaaacctcagggccataaatcgcctgctgcctcctcaggtggacatgcttgcttccaatcgaaatacagtggaagctttttccatggccaaggataggcccaatggctgttctatcccatagcaggcagacgcctgagaccctcgtttgtgtgttatgctctgttgaagatggggcagaacatacttcccagcagctgtgaggctgagacgaggtgagcaagtccttttgaattctctttcatgcattcattcagyaaccttgtatcatgcacttactataattacgtgattaatcattgcaactacatttatgtgattcttctccttgccaggcactgtggtagatgctgccttataccagtgcccaaggcggctagcatacctgcctgaagttagagacggggttggggagacagctgtcctttaacaatggagagatttggactgtcctgggagagacagagccctatgaagaccatcatgggaacatagagcctaacacaggcactgtctgcttaactagacagacaagcccagttccctctctccttccccctcccaatactgtccccagctctgcccctggatgctcttccccattcccctctgctgtggtctctcccccgtctcttccctttcctctttcacaaaatgtctgtgcattttttttttacttaaaaccactacgcaaaaatcataatttaagtcaaaactgggtcgattcaacccagaggggattttgcatgacattctcaagaatattttcaatttgtctaatatcaattgtctccccattcaggtgggctcacactcttgtgacgaaggtgaagatttaaaaataatttattcccatgtagccacaggaaatcaattgagcagagaaaggattgagcagagcaagcgagatttagttttcattaaaataacacagtacctataaawaaggtgagaatccagttaatagctttctattaaagtggagttgacggaaagaattgcattggaaggattttgttttgggactccgtgaggatttaracattcccttcctgtctctgggtctctgtgcattctgaagtttgaatcatttcatttgtatttctcttttcaatttgctaaaaactattcttaaagttgcatccatttgtcgcttcttgttgggtaggaataaaagtcgatttctgatcccctcttatatgaaaaatggatgcattaggtccaacatctgaggtcttcctctggccagtcataaaacaatgacaaacaggctgcttgaaaagagatacgagactgggcgcgttggctcatgcctgtaatcccagcactttgggaggccgaggagggtggatcacttgagcccaagagttctagaccggcctgggcaacatggtgaaaccccatctctacataaataaatacaaaaattagctgggcatgggggcatacgcctgtggtcccagctactgggaaggctgaggtgggaggatcatccaagctgggaggttgaggatgcagtgagccaggattgcaccactgcactccagcctgggcaacagagtgagaccctgtctccaaaaataaaaataaaataaaagagatatgagcaagagaataaaaacagagtgatcggggaatgtcagaccaaaacaggattttcacaagtgcagcttactcactgtagttactgcatatcagaatcatctttggccagcatcaaagactggtcttttcttgcctgaaagaatccattattggctatgttgaaaaaattaggtcatgtatagactcttaccatcttctttcctcccaactctcaccaggtctggggtcaaagatgtgggttctagccgcagtcctgtcctcgaagaacagatggccttagacaggtctccaggtcctcagtttctctactaagaaaatgtgccagtgcccaataaggcacgggaagggttggttggttcagcccgttctgaactgcctttcagctctggatgggctgtgaggatgtgatgttctgtgtcctgttgtctttcaccagggaagggtgcctagagagggcgtcaggtgggtgctaaagtgagagttagacttccagttcatccactgttagatgagcacaagccagcattccccaaagcatgctacccacaccaaccatttttctcttaatggtgatgtgtctattttaaagaatactgggggcgggggggaaaccaggcacattagaggcacaatttttttttttttttttgagatggagtctcactctgtcgctaggctggagtgcagtggtgtgatctcggctcactgcaacctccaactccctggttcaagcgattctcctgcctcagcctcccaagtagctgggattacaggcatgcgccacagtgcccagctaatttttttttattcttcatacagttggggtttcaccatgttggccaggatggtctcgatcatctgacctcatgatccgcccgcctcagcctcmtaaagtgctgggattatgggcgtgagccaccgcccccagcctagaggcacaatttaacacaggtattgtcacctaagggcaggacaagggacaccaggctttggcaaccagcctcatgcagaccagacgaattccgagtgtgtggcttggtacttggatgtgtgacaatgtggtgagtgactgctgtttaggaagtcactgcctcaggaaaccctttctctgctaagctgcagattctctgcagagcagtgccacactacagaccagacctcagcgtgtctccttgttttgactttatcatcacttttaaatacatacaattgagagcaagatgatgaagtcattcaaggattgcatttcttcctgagtggaggacctggttctaggcacagcaacttcccccaaagcagctcctgttcaccgtctctgcagtttcacccacagagcgaacctcggtccgcagtcctcagagcgtgcagcccacgagcacagctgctccgacgcatgcagtgctccctggccagctcatcctcactctgaagtcgggcattgtccatccagacaatgtgtttgactgcctaccaccttcaagacattgcattaggaaccagggatttggcgtgaccggcaaaaatagctaacactttcatagcatttgcaatttgccgagtgatgttttcagtgttttgcatatattaacccactgaagccttacaaacctctgagggaaactgttgttattttacagaggagagaattgagacacagaggttaaataacttactgtattagcctgctctgacaggcataatgaaacatcacagactgggtgacttaaaccaggggtccctaatgcccctggccacagacccrtaccagtccctggccttttaggaaccaggccccacagcaagaggtgagtggcaggcgagcaagcattactgcctgagctccacctcctgtcatatcagtggcctcataagattctcacaggagcacaaaccctattgtgaattgcatatgcaaggatctaggttgcatgctccttatgagaatctaatgcctgatgatctgaggtggaacagtttcatcctgaaaccatccaaccccgcccctcccacccccatccattaaaaaaaaaaaacaaaaaaaaaactgtcttccatgaaaccagtccctggtaccagaaaggctgggactgctgacttaaaccacagaaatttattgtcttactgtcctggaggctggaagtccaagatcaaggtggctgcaggttggtttctcctgaggcttctctccttggcttgcagatgactgtcttgctgcatcctcacttggtttttcctccatacacacacatatcttatgtctcaatttcctcttcttataaggacatcaatcagattggatcaggccccgccccccaaagaactcattgtatcttaattacctctttccaaatcttatctccaagtacagttacattctgaagtgctgggggctaagacttcaacatataaatttgaaggggtcacagatcagcgcaacacgcccagtgtgacaccactgaaaaatggagggctgagattggaacccagaggccatgctcttaagctactatgccatamctagggtagcagtactatataatttatcctccaaattgggacactttgagagggaaggatcgtcattaatatttgtgctgggtcaacaggcataagatgaggctgtctcaggcacaccaggatgtgtggtcacttaaattacacaacttcttaactctgacagaatggtgcctgcccttgtggagtctacagtccactggatgggagacaagaaagtggcaatgctaatgcagcatgccaagtgtcaggacatgggggttttaagggaccatgagaagttgggagcacagagaagggcccctgatttggtctctgggggtcagggagggcttcctggaggaggcgacaactaagatgagattgatggataagtaggagttagccaaagtgaagtacatagtggtgagagctgagatggaatggataccaaggcctcaatctagagattaggcctctgggctcgggcacacccctactctctgggaccgcttatataaaatgagatacagtttacatcaaggatctgtcactttttcttaaaaagtcagatagtaaatattttagattctgtgggccaagaggcaatatcaaggatattacataggaacttgtatagttacttaaaacaaaaccatgtaaaaatatgaaaattattcttagctccaggaccatattaaaacaggcagctaactggatttggcccgcacatttatctcaaagtttgtggtcttacccagctttatggcatatctattcatcagaaagctttgccaggtattgtatagaccatggggcagggggtagcttgtatcatggacgtacctacattaaaagcccccaagagccagcaaaaacccatattcaaacctacctccactctccagccgcagtccagccccagccaagccacttaacctctctgaatctgtttcctgatcctgtggaatgtgggtaatagcactgcttctcagggctgctgttagctgccttctcattcctcttactcagcattcatcaaacacttatcctgcactgggcgctgcaccaggccccggagttcaaaggtggccaagatgccacttttgaaaaaaatgttttttgaatgtgttttttggttttgttttgtttttgtggtcattttcttaaaaaacctgggtgtggtcaagagcacagccccctgttttgacgctgcattagtggagggaatgagtttaacgaagcgggtgacttcacctgggtcacctgccaggattctatctggggtcacagttacttcaataaagtgaagcaggaacgaggcagaggggacatgggcctttgtgagaatgaacgatggaaactctttgaactcctgggatagaaaggccaagctgtcactagagctgttcgtgatgggagagtgattaaagctcgttggagtttcctgccttcttctggcatcagaactttatgcctgctctgtgttcggaaccagtgcagctccgagtcctgagctttgacgtgggaatcagatttccctgggcctgagtcagattctgggccccacagaagtcagtggctcccatttggctgagggggttcccaccggaccctttgctgggtagaaaacacagcagccaagaaagatctgttggtccttgagtcagctgttgagaaatggagccacaggggatgctggggggttctccgaagcttgacaccctgccttcagatcctggcatcatcatttggcaggaacacgtgtggcctttcacaagcaacaggatttctttgagcctcagctgtcccatctgtaagatggacatggtgttgccttcccaactggcttgccctgagactaaatttggaaattgccaacattcctcgaatgctccttatgtgccagctattgtggggagggcctcagctcagccccctccaaggcctgatagtttgaaggcactgaggtagaggttttgtgtctgttcctagaattaggcagtttggttccagaatcaacatcyttaaccattagatgacactgtctgtgaagagaaagaaaactcatgaaaacacaattcacaacacaatgagtgtgtgtgtgtgtgtgtgtgtgtgtatgtgtccttgtggtttgcttattgaacaagcatttcctgagcacctactttgtgcaaagccatggaaacataaagatgactaaggcacagttcccagctgcaagcggggagcttccagacatttctatcttacctcagagctagtgataagaataggttccctcactctcacttccacccagcatgtgccttagcttacaattgatagatttttttaattctgtgaccacagagctctttgccagaaatgggggcgggggaaatccattacccagragcggccccagctcccccttcacagccctcctttcttgtgggtagctggcattgccacgtacagagtaacttggacrtgacgcttcaccgtgaagtcacactcctggcctgctgggaacagtggggcagccctggaggagccaacccgatgaataacgttattggaggtgtccatataaagaggaccttgtgtaaataaatgatgtgaccctcccacccccactttggcagggctgcggagctgagaaagggragcacaggaaatgtgtttattttgcctttgctgagcagtcgttctgagggtacacaatgcaacattaaaccccaggggagcctcctaggtatgttaactcgccatctgcatgctccctttgctgtgcaaagagcacagaaatggtttccaagccttctgtttggctcccacccaccctaccttttttcttttttccttttgtctacttgggaaatttttgaagataaagtgcagcagatgayataataaacactttttactcaccatcctgaattcacaaatgtaacattgtggcatatttgcttcagatcttttatagatctgcctatataatagaaataaaccatcagggtcaggcacggtggctcacgcctgtaatcgcagcactttgggaggctgaggcgggcggattacttgaggtcaggaattcaagaccagcctggccaacatggtgaaaccccgactctgctaaaaatacaaaaaaaaaaaaaaaaaaaaaaaacatagctgggcgtggtggtgcacacctgtacacctgtactcccagctacatgggaggctgaggcaggagaattgcttgaaccgggaaggcagaggttgaagtgagccgagatcacggtactgcactccagcctgagcaacagagtgagactcggtctcaaaaaaagaataaaataaaataaacaaaccatcaccaaggtagaaatctcttttgaatctcctcttctccccttcatccctgcctctcaacctcttatgaatttacaatataaattccagtgtttgttttatactgtgactcctatatctggacccagatacaatatgcaacacaggtttatgttttcataatttatgtaggtgctatcatactgaatatattactcttcaatttgcctgttctgtacaactatgtgttttgatgtccagccctgtggatccctcagtctgttccaattactgtatcatgttccatcatatgattatattgcattctatttatgtatctacctataggtagacagataaattgcttccatttttttatcattatgaataacattgatcaaagcatcctggtgcatgtctgccttcagatgcacaagtataagtgtgtccctatagtgtgtgtctcaggacacccgccagcagtggatggggaccccgatttccctgggtcctcctcactgcttcgtgttgacatattgtgatagttaattttttgtgacaatgtgactggattaagggatgcccagataactggtaaaacattatttctgggtgtgtctgtgagggtgtttctggaagagattagtctttgaatcagtagactgagtaaagaagagcttcctctccagtgtggccgggcatccttccaatcacttgaggccttggatcaaacaaaaaggtggaggaagggccaattctctcttttcttgagctgggacgtcggagctcctggttctccggccctcgtatccagactgaatctcaccaccagctttcctggttctccagcttgccaatgacatatcatgggacttcacagcctccataatcacacgagtcaatttccataataaacctcctcttatatatgtcttatatatcctactgattctgttcctctggagcaccctaacacacagatgttttgtatttcttcccaactaagtggcctctccattgaaaaaaataagaaaatttaaaacaaggagcttgctcagaagtggcatgacctgcccatgaaaaggaatgctttgtaaatcccagagttcaacatcatctttcctcagggctcctggagattctggactcaggagcacttttcttttcttttcctgggaccatgcacagtggcatggcatgtcagcctttgccaagtaaagggcgacttcctatggcatttttgaccaagtcttgactttcttacctgggtcatttaagaatatttgggcctcttctcccatctgctgtcagcacctggtccaagcctcattactcatctcttgcctggatgggtgccctgtgtccttactggtctcctggcgtcaatgtcccctagttgaatgcatcagcatgtttatttcatgcagtcacatatcaagccatttattcatccatcattgactggagccctgttcagtgcacccctgtaactgttgctatggcctctcattacctgcagaacccaacccaaatgccttagcctggccatcaaggcatttcatcatcccaacctcaacscatttctccagcatcatctccatcttctccacctcctcacccacatgactccaagcacttgatgacaatgttcttgctccctctgccaatgttccctgtctctacttgtgaaacactttcctgtcacctagaagtcacttggtaagctcagttcttacccagggagctttcctcgggctccartgcaggactatctttttccttgtctgcttccgtagagttatctacctatcatcacctgtctcttcagctacagtgcgcgctctgtaattccaaagttctcacccatctctgtagtctcagggctaagggctgtgtctggtatacagaaggcattcaattaaagcatattggtgaatgtctcctgaccttccttcctgcacttaccagctcggcataggcagtgctaccactcaactgtctgttatctgttagaaagtttttctgctgagcaaattactggagacatgattgaaggtttgtttaatcttgagaagataaattagtatttcaagagtttaacatagcatgtgcaaatgaatattctttattattaatcaggaagtcttatctgtttactaaagcaagcactgtttacttggaaactcttttgaatttactctttatacttaaaagtaattcaattgaatgtgattgaatattgtctttaattctgacrtagctagttaaaaaccaagcttttcctaatcaatatgaattagggaagactcttcactggctatctggccagtctctaagaaggcacaataaatgactcggctgcattttctcagctcactgcttccaaaatgactagttgcattagaatcccctggaatgctggttaaaatacaaaatctcaggcctcaccctagatctaatgaatcaaatctttgggtggggcctggaaagctgtatttttgtagatgttccccacatgattctaacatatactgagattgagaactgtacatacagatctgtgctttccagtatggtagctcacgtgtggtgactgagctctagaaattttgccagcctgaattgagatgtgccataagtataaaatacagatttcaaagagtacaaagaaagtaaaatatctctttcattaatatttgttaaatattaattacatgttaaaatgatattttggatatattgagtgaaataaatgattagaatttattccacctgcctctttttgctttcgaaggtggctgctagaacattttagattgtaagtgtggcctgcatgatatctccctctatgggacagcactggtctcaattgtagggtcactgaggacatggtgcttccctcctggtggctttcggatagttggtgttcattgaatgtcttttgagtggacaaatgagtgaatgaggttgacgcataacacgtggtttccacttacctactatgggacctagacaggctgtttcacttctcttatatctgtaatataagcagagtaactggagcccttttgttcacctgcrgttggatctcagtgatttggggaaggatcttgggcctccacttgcagtgactatagtcactatagcttcatcagcaggggcgggaaatgatgctgcctccagcttgagagtgatgaggccagcacctcctgggagccctcgataattttatcttcttttgcaatccttccccaaatctcttggttccactcaaaactaggaacagtcctgcccactgtggcaagctgtggtgcccatctctcttacagctgtccccacaggactactataattattcacttttatcccattgcctgtaatgcatgactcaactctagaaataccagattaaacattttcttttacatttaaaacactggctgtattcaaatactacccatctggttttttttaaatcagattagaagtaaatgtcttattcttccaactaaattccagtactacaaggatagcaaaacaatgaaacagtaatacactgggggtgtygggaatgcagcaataaacatttattaaaaatactgatagaataaaatttttaaactaccaaaaataaaaaagaaaatcatatgaacccattctgaaatccccaaagtcctggaatacagaagtgcctgcctccttcattattccacaggagtcactgtaggcttaaatggctctgaaaattacatatttactatgktggtcaaaagagcrgtcttcaaaatccaatcatctaggctcatatcccatccctacatcttactagttatgtgactttggacaaatgaactgagcacctcagtttcctcatctgtaaaatggggataatactagtaattagctcctgtgtaagatgggagggttataggtgactaatgtatgtaaagcaattagcgtggtacctggcacctggtaatacattcatattgctattgattgctgtttcaaaaactttttctttttggcacctactctatgccaggtattattggatatcacccagtatcccagagaagggaagctttttgggagaatggcataatgaaaggattaagatgtaaaccgacatagattcaaaaaaggaaaagttgggctgggcgcggtggctcacccctataatcccagcactttgggaggctgacgcaggtggatcacgaggtcaggagatcaagatcatcctgaccaacatagtgaaaccctgtctctactaaaatacaaaaattagccaggcatggtggtgcacacctgtagtcccagctacttgggaggctgaggtaggggaattgcttgaaccccataggagctggacaggcaaaatatagcaacaacaataataacaccagatgcctgccatagtccagtcccatgacacacacagtctcatctcctctttataacccctccatctgacacagatgaggctcagaggggttgagtaacygggccaaagttaactaacctgctgctaagtggccaaactgaatccaaacccatgtctttctgcccagaatgtgtcccctctttctactgactcagttctctccattaaagagatgggatcaatccctttgatgtatctgaaaatctgtttcataataagacatctcttatactcaatgttattggggacaggcaaaaataaatcattgaggttgaaatgagaaggtccctgctttctgtgagccccagactgaccrtaggtgcatgaagtgaacccggcgggcacactgcgtggggtgggctaataacctccagtacgagaggcccagatctgagaagatggggcgggctgcctgggagtacagagctccctgtcactgcaggagtcaagcagaggctaaagacacagttgttcaggaatgttcggcattgagcagactagcaggatccctccaggtgagactttaggatgctctatgacattttcaaagaccattggagaaaaagtatctctaccccgggtaactcatagtgtttaattcaccctgccatcttaccaagccatgggaagtagggggaagcctggacttgggctgccccaggccggtctgtgtgttcaattcaggtgggactgagcagggaaggtgcagcctgatatgcacttgggtgctggacatggcagggggcacagtgactctggctgtgttcccctcctgccagtattgggctcccaatattgcttcaagtggagttcaccttggtttggggtcagggagggactgagaggcattcatttctggcaggcagccaggctggcctcacaggttcatgtgagctgcaccaagcactgccaagatcaccttgggttctagaagcccatcttttattcattcgagaagcaggccgagagactctgctctatgacattttcaaagactgttggagaaaatgtctctaccccaggtaactcatgatagtgtttaattcaccctaccatcttaccaaatcctccattgcccatttcaaagaaatccctataccagcacatgctgggtgcttgataaataataataataatagctaacaattactgagtactactgcatgccagacacttctaagtcatgctctgtgctatttcattcacttctctcaacaattctgtgagactgcacagcagctctaatttgtagatatggaaactgaggcatagggaggttaaatcatttgcacaaggttcacagcaagcaagtctgggaacctgggtggtcctgaacccattctgtgatgtcaactgatgggacatgggaggactgcacccagctgattcctcacggtggtcctgaacccattctgtgatgttgactgatgggacatgggaggactgcacccagctgattcctcacagtccctcaggaagctgcagggagaggagagacagccctttgtcccagtggttgagcgactcccccgcactggggcaaatcatctctccctccccattctctcagctccttcccagattccaccctgcccccagcagtctcttcaagcacsttgtgaacattaagttatcccctgctattcatctgagctgatgttggctcagacagtaccaattcgacgtttctccaagggcggacagcgggtcggcgagagtcgataatgggttccagcagattggacgccgttcagatctaactcgagcctggcgccctttgcagacttggagtccaagtcctcctcatgccttagcagcaagttccaaagcagcctggaggggacggcaggcgtgtggtcaccactgacctcctggccccacagccccacacccacactctctaggactaatcacacgcaatgctggcttctcgcattccccagtgactttccctgtcatcttgcctgctgcgtgcctgctggctcatgggaactcaccggggcggagactttgtctgcttcctgctgcatcccctgcacctagcacagtgcctgggccatagtgggtgcaccctagagtatgtgctaggtgaatgcattcataattcctgttcttagcatgaggcagctgacacctcgggcctctcggaccccagacttgttcccgcagctgcctcctggccatctttatttggcgttgcaaatttgacaggtctgaaacagctcagatatcccacctcaacaaatgcaacctggtcttttcagggtaaaatcctcagaggcctctgtgacatcctccttttccatgccacacgtttagcccacgcaggtcctctcagctctactttcaaaggagatcaataattcaaccacttccccccaccccggctgccgtctttcttctccagtctcacctggatgaacccatcctccacctcctctcccacctgagaacattctactgccgcagccagagctggtctacagcgtaagtcggatcatgttcctcccacactcacacctccaagggctcccagctcagagtgaaagctcagagcctccttgtggcctgtgaggcctggcactgcccactccattccaggctcactgtgtggttcctcgcatgtaccaggcacawgctaagcacacaccaggcacatgcctttgccttgctgtcaacgctgcctgtaacacccttcctccaggtttccccattagttccctcacttccttcaggcctctgctcaaaaaatcacttatcatcgacgcctggttttgaggatggatgagtttgcatgtgaggggcatttagaacagtgcctagttcaatagctggtagttacgaccgggttcttgtaacggctccttagggcctggttcgtagctgattctccttttgttgaatgggatatgtgtccagggcctggtccaatgcctggcaccaagtgggaagtcaaacgttcgtcgaacggaaggtgtagagacgagcctgggaagcaatgcacacactgcttagttcaggccatgggaactggacagtgtgagagaaaggtgacagcccgtcacttcgatatattctggaagcaaactccttccacccctacctccccccactgtctgtgtcacttccctggggcctaacccttgccttctggctccgtgctcagggagacccaggaaggccagggctgtggtctcctggaaggaactgggctccagacctggcttaattggggcgggggaggctgcaggtgagggaggaaggggaagctgcgggagccgggcagcagcccctgcagaggtgagaccttgtgttgggctctccccgcctcacctgtgttgctcaggttctgcccaggcattctgggaactgctgctggttagaggagggggtgggacccagctgccttgaccgtcactgcttgtggcctttctctgcctctcagctggaggctttagccagaagagtctgagaatgaaggccatggcccaagtcttttgttctctttccagggcataaaaaccttgtcaatctkctgtttagagtagttcaaaaaatacaaacagctgttgtccctaaccaaaatcatgctgctgatagccccagaaccctggcctttggaggcctcagaaccccggcctttggagggctcagatgcctggctcatttgttcttggtggcttggccccgaggtrtggaggaaagcggaaggttgttgtcacatcccgcatcatccggccaccttggcccctcagtactcctcctggggcactgagaggagcgcacccagcttcaatctcaggggacttgacaaagggtatttagtggcataggtttctacctgtttatgttccgtrtgccttagtgtgttgagaaacaaaaagcatggacattttttatgaataatattataatatgaaactctccttcccctcagagaggatgggccagctgtttggcagagaagcctctctgctgattaataacagcaccttcacactttctttaggcaaaatgtggagaagtgcttgctgcctacggagcctgcttttgggaagatcttggtgtgggtcacctggtgtatacagtgttactgtttgctaagtggaagcrtcatggcctggagggtttggagccagggagacccaggcttcggctccaaattcatcrctgattccctgtgttgccttcacctctcagagcctccgttttattatctctagaatgggaatgatagtaaccactttgcagggtttctatgaggaccaggggtcgcaggtatgtaaagggctcagcacatcccaggcgcctggtaaatgggagctgttattcattgacctgggcaacagctattttttggagcaccaactgtgccttagatgggaaataaaataaaaatctctgcccttgtggtgctcacactctagatggggagccgggtaataaacagataagcaagcgaaatattaatatatagcaagtccggaaggtaagggctgcaggttaaataaygtgggcagggccaggcgcggtggctcacacctgtgatcccaatatcttaggaggccaaggcaggaggattgtttggggccaggagtttgagaacagcctggccaacayggcgaaactccttctctacaaaaaatacaaaaattagccggtcatagtggtatgcgcttgtaatcccagctactcaggaggctgaggcagagaattgcctgagcctgggaggcagaggttgcagtgagccaagatcgcaccactgcctgggagacagagcgatactctgtctcaaaaaataaaaaaaaaaagaaatttaaaattaggcatggtggaacatgcatgtagtcccagctactggggaggctgaggcaggaggattgcttgagtgcagaagtttgaggttgcagtgagctgtgattgcaccactgcactccagctggggagacagaatgaggccctatctcaaaaacagatagatattggtgggtacagtggctcacgcctgtaatcccagcactttgggaggccgaggcgggcagatcacctgaggtcaggagctcgagaccagcctggccaacatggtgaaaccctgtctctattaaaaatacaaaaattagccaggtgtggtagcgcatgcctgtaatcccagctactcgggaggctgaggtaggaggattacttgaacctgggaggcggaggttgcagtgagccgagattgcaccactgcactccagcctgggcaacagaatgagactgtctcaaaaaaacaaacaaacaaaaacagataggtagataggtaggtacacaggtgggtgggtgggtgggtgagtggatggagagggagagagagagagagagagagatgatatatagagtggtcagcgaaggctcactgagtagatggcatttgagaagcgaccccctggcagtgagggagatgaccctacctacaccaggagacattcactttctatccctggagaggcagcccccagccttgaatgactttgggggcaaggtctcttttcactgtttttgtctcattggaagtgggctttctgacacgaggctctcaacaccacctgcctggcctctccccttcattcctgagccttattgatcaaccaaattgccctccacaaactcagctatcttctgtcagactaatgttatattttaatgtcccagggggaaaaaatgagtctatgccactgtagagctgccacattttaatatggagaacttggggcaaaatgtagctgaaaggggagaggagagaaggggtcgggaggaggatgggatcacagcgaggctctgaattgaggtccatttccaccctttggcggcatagactggaaagaaaatacgggacagtcgtcctcccacctcctgccaaggccacctccttctcatcatccgagtctcagtgcaactgtcacctcctcagagaagtcctcccagaccagcccactgcagcaccttcccagaccctgctaccacctgaaatgatggaagtgttttaggttggtggttcattttctccgttagaatgaaagtgccaagaaggcaggaaacttgttttccaagaatctagaaaagtagttggcacaaagtaactgctcagtgctcatttgctaaatgggtgggtgaaaccccttcctacagagtcggggcaggggtcccccagccagcgtttttcaaagtgtagttcatgtcccacgaatgggctgtgatatcactttagtgactcatagttactggcatttaaaaagtgaaatagaaaaaataaaaaatagcgcacactacacatggtaaggataactgttgttttaagaaatatatatggaatgatatactttatttctcatgtagtagtcaaaaaatttgaaactcagcagtgaatgctaagttttctcagcctagatgacttcaaaaggaacattcttcccctggagactgtaaacctagtcgcataaagtttacattctggggccccaaagcagaacctgaagaaaagattcctttgttttctattagctgaaaaaaatgaataactttccactgtaggggacccagtctcctaaatctccactgacatacatgggatcatttacacactcacatacaartgcacacacacacagatacatgtatcatatatacccactgacaacgaggacacatagacacatacatacatgcaggcagatacatccatacattcaaacacacacaggtgcaagcacacagcagtgcactcacagatgtgtgcatatacaaacacacatgtgcacatagacacatgcaggcatgcacacagatacaaacacatayagactcatgctcacaagcatgcatgtgcatacagacacagttttattcaacacatgcacatacacacaacacacatgtccatacacaatcatccttattctgttccatgcactgacaccttctcctccccggggagattgtcgggccatgttcagatgtgcaccctggcaagggagagtgtggaacacagcctctctactaaccaaagtcagtggggtgttaggggtgggtgcatccacaggctttgcagttaggccaacttgggttcaaatctccacagagtgactgagtgaccttggtcaggttactttatttcacagagcctgattcgtcacctgagaaatggggctgatgacagtcatgcctccttcccgggggcggctgtggggatgagctgggagcagggttgtcaaaggcgccagctttccctgcaggtgtgtgggacccacttgtgcccctgcccagctgtacggcattggaccagctccctgggcccagatacctcttttgtaaagtgaggatctcctawctctggcaggatcctggtgaggaggaaacaaggctctgtatgaggagtgacagctccgaggctggccaagcttgcaaggtgctcagggtgtccctactccgtcctccaaggcttcatcttcctccaggtgccccctcctagccagcccaccccatgccgtcctcaccatctctggggtcacacggaagccaggctgggctcccctctgacagggacgctctctagaaaaccacagtctgggccatgtagagacatccccttgaaatgccatctgtgacttctcagatgggtctactctcgctccatcttcccccatctccagaaggctccagcacgatgaccctgtattacctgcgatgcggcaggggcccctcgggtgccccagtgagcatcggttgaaaagtgtgtcattttcaccttagtagcttcatagaatgtggccttacggagaggagatgacaaagctgtgaatgtagggaaagagaaaggtcatggggcaaggaatggggatcagccatcctgggcccaaggacagagcatgttcacatagggcacccgggatgaggaggagcaaagcaccaagacccggtttcggctttacatttgccttcagagcaagacaaagcagcagatgtcaatgacaaagaaactgcaaaacaaagaaatgcttaaaacttgaccagaaagcaacagagttagcctgccatctgatgctgcctcctggccctcctgtggggacctacgagccccctgcacccacagcctcgcccccacacccagggttcgctccagggccttctctctctcctcagcttcctcctgtcatcaggtagcaagtacatgaggctctgataggagccaggcatgtggcaggtggctttggggacaggaaagccaaaaggcagacgtggccctcacaggctgtcgtccggtagagggacaggcactgtcctcatagtgatgcccaccattgcaaagcatgctggagatttctctgccagctctgggtggggccggggagctggagkgagcttgtgcaaatgaaagagttgactgggaacatcttatttaatccttaccaccttcctttgaggcaggtgctactgtgacctgccgagaacccaagactaggaagctgcagagttcagccagcccatgcggttctttcattaagaagcccgtcgcagggcaccctgcggtccatttctatgaaatgtccagaataggcaaatccgtggagacagagagcaggtcaatggttgcttaggggtagggggatggggacagagggtaacagcgaaagtgggtggtgggtacaaggtttctttttgaaataacaaaaactgaaaaccattgaataatgtactctaaatgggtgaaatgtatggtatgtgactcatatctcagtaaagctgttaytcaaaactttcagctgggcatggtggctcatgcttataatcccagcattttgggacaccgaggtgggaggatcacttcagtccaggagtttgagaccagcctggggaacacagccagcaagaccccatctacacagaaattcaaaaaatctgccaggcctggtggcatgtgactgtagtcccagctacttgggaggctgagtgagagaatctcttgagcccaggaggttaagtctgcagagagccatgattgcgccactgcactccagcctggtccacaaagcaagaccctgtctcaaacaaaaaaagaagttttttcatgtgaagccaagcccttgattcctctgtcagctggcctgtggctgcagcgaggagggagggagaaagggaaaagatgcacaaaaattcttgcaccgctggcgtggtcttcagttggtgctggctgtctccagactgggcagacattcccagcaggctcttttcttcggtggcacttccgtgggctctctggggaatcagtttccttaataaggcttcattcccgcttgcggttcccaactcattcctcagctcctctaggactggaaatccatcctatacccttccaggggacccctcctcctggacaggcccaagcatgacccctccctggagcaaggccccctctggtccacaagaagctacattcatcttcttcctggaaggtctgggagggccagctgcactccagcttttcctttgatgttagttagcagtaagtcacaggtttgagcccccagacgatgagtaaacgtggcccctcaaactgtaagggcacatatattaggctcttcagtgatttaacctcccctcttctatttaacacatgggaggacatctcccaggcttctcccataggtatatgggcaggtgtgacttccagctctgaarcatctctccagcaaacttctctacagcttctttccccatctcctaaaatccaacccttttgtgctccatgtgggcaaagttgagtgggactgtggttacaagttgagagtagttcaccagctattagcctctatcgtagagtctgcttttagtccaggacctcttttggatcgagcatctagtrtattttgatgttttagcaaaacttccattttaacatcctgttgcaattatcaaatatttgcgtggggggtgtatattctttcttcttccctagagcaactgtgttgtgtcatactcagtaaaactgtattcatgccaagatgggcttgtacacagagcacatttcctgagatgccctgtggatgcttttttaaatgtcccttttaaaacagtgcctgaagttcgcagatggatttaatttttttcactggtttatagatgcacttcctttcataggcagtccctggcactttcttgccctaactcttgcataggttatatatccaaataaaaaatgcttcttacaaaaagaaagaaaagaaagctgacgtttcagcgtcacatggagatggtaggaaatagaattagaaatgatccctccttcccttatactgtgaataaacagccaggctcattttttttttaaagtccttaatggcgatttcccaattaatcttgggaacgacccaaggacaatgtcagccaatttataattgaatccaaagtgggggatggcaggagtgggaagtgaraggtttattctcttctcagccatgtgcactgacatttttttaagcctacaagggtgaatttaaaagggcctgagagggtgaagtagaggtgacagccagattctttaaagacaagtgatgctttaaaaattaaaaaaaaataaaaaataaaaaactttggarggaaatagctaaacaggacttagatgagtcttacatctctgggttccaggtccacctggggctcaggattttacaaacttgcactgtctcattccaacaaggagaaataggaggccactgaggcagaagaagcttccgggaggcttcagactagtccagctggtgctgcctctgaccacagtttagctttatgggagggacgggacaggcagcacctgatgttggaaggagaggagtgttctgggggaaaagctgagtctcactgggaatgtgttgattgggtaagaacacgttaaggttgggctggggcaggtcaggaatgagtggttaggatggaaaagtcaagctgggagctcacacttatcaagtgttcaccatgcagaaggcgcggggtgagcatttgacaccaactgtaccatttggtttctgtgaggtgggtactgttactcctattcccatttgacacctgaggaaactgaggcccacataaacacaacatcttgtccaggtgcacagccaactgaggggtgaaactcaagtttggagtgtgccttcagcatctcaccttgactcctcatcttctgtaatgaggtaacagacaaagggaacagatagtccattttgatctcgtatttactgtgtgccagtataaagcgcctcacagcagccgccccttcttgtacaaccacttctttacacgtgaggacattaggacccagaaaggtgaaggaacacacagctagaagatggtggagccaaggtcaaaatccaggtctgtctgtttccaaaggccaggcagccattttctcccagcccctgaactccattcggagttgcctggaaagcatttggtgtgaaggagctggccacgtctacactaatcagctgttaaccctcagaactaccagccgagagaaatcctggtcggccagagcctcagtccctgaacagtccccctgacattgcatggaaattcctaaaaccaacgtcatcattcttgaaacctccctctacaacaccataaatgcccttttctcctgggctgaatgaatggagaccgtttctcccaatttatggggtgatgccagtttggctgggtagttctcataggccctgaccctggcaacttaaagtcttccgttatttggctggggacagggggattgttattttaggagacaatcttctattgttctgtgcaagcaaaccccatcccccttcccaccttcccctccaggacccccgagataaataagaaaatgcactcattaaacaagtccaacccctaattcatgcggcttgcagtaaggacatagggaaaatggttagcacacagcagcgtgttcttaaggatctgctggcagctacagaagacaaataatgaatgccytgtaacccagcctggccacaccattccaggagctcagccttatcaaacacaggccaggttgtagatatttccaccccgggccctcctccgaatccaataggtattcaaggatgtggctggactgcatttattctgcttggggatttgacatgacatgactgtctcccactctttagccaaagtgagacagtggattgtaggtgtatttgtgagatggagccctccaggatagaaatcagccaagctaagccagtgtcctgggaatgggactatttgcctgccttgcctactctgagcaccatcaatgtacctgcaaaatccaggtgggaaccagggtgtgtatagccaaatgtaaagaaatttttcaaaacggctctgtatgaagataaaagatctgaacagcttactctgcgtgagtttcgaatggcagctaaagggtaggtaacaggagccgatacctggctctgcacctcctcccaaaggagtcctgctggtgaaggatgccgtgctgggccactcttctgtttgccgacttggctgactcctgaggccaggtccacaccgggctatgtgtttcctgatttgaggccatttatcctcattaccccatgatgctgcagttcaggctctctcattgcagccagggcttcctaaccggttttctccccaggccagctcctatggatgagcagaggctgcctgaagagttggagcagcaggcgaggctagggtgtagagagatacgttcgttgcatttttgccaacccacccatagctgcccctttattttcattctggcagtgggttctccttgggttctccaacctggaagcagcttgagcagcctccctgccacctgtcatgtgctctaaagatgcctcctgggtagtaaggctaccccctgcctcccacctaagcatagctcagagcattgcaatgtgaccattacatgtccagtatggtgggttgtacaagcacatggatgtttatatatgtatctcaaaggtcagagcatgtgaagaaggcgcactgggagagtcccactaaggggagccccatccctgtaaacaaacttgttcaagtccctatcactgaggccccctccctttggctggggagtgcttcctgcttcctctcccacaaatgccaaaggatgcagcagattgaggcactggggagaaagtgcccagcctgggagattgtgaagtggagtgcaaagccttacctgctagtagaggaccatgggaccttggtcagtttcactgtctgcaaactgagcttgtttttcccaccatagtggtgatctgtcagggctggggcaaaggtcagaagcctgatggatgggaaagggctttaaaatataaaattgcctgataaatgtgaggaatttgggtttgcttttgtggaggtggtgatgatgatgatgatgatgatgatggtgacggtgatgatgacaaggacaataatgagctcagccagacacagcggctgcttgacgttcaccctggcaccacatgggaggcctttcttcacagtgagcttcgtggtgatgagcacagcacagcccagcgtagtgtaggatttattttaggtgcagcgtggggtagagataaaaagactacctgggttccaaatctgggtccaccacccagctctgtgactttgggctggtcactcatactttttgtgcctcagtttcctcatctgtaaaatgagaatgataacagtatcctagagtactcagtttcaaagaccatgggctagaactcaagacctaatgttccgatccagacccgaagcaagctggggtagctgacctcgaggcagagctgtgggaagagcccactcgtgacctggatgcgaacccttgacttgccagaagtccatgggcaagttctggctcctgtgccagccttagtttccacatctataaaataaagacaggccgggcatggtggctcacgcctgtaatcccagcactttgggaggccaaggcaggcggatcacttgaggtcaggagttcgagaccagcctggccaacatggtgtaaccccatctctactaaaaatacaaaaaagaaaaaaattagctggatgtggtggtcggcgcctgtaatcccagctacttgggaggccgaggcaggagaatcgcttgagcccagaaggtggaggctgcagtgagccgagatcatgccacggcactccagcctgggtgacagagtgagactctgtctcaaaaacacaataaaaaataaaaatgaagacagtaacggttacttctctcagagccactggaagggattaaataagaccctgcatgacataatcatgtgattattaagtgccggctgccaagctaaacactttatattgtctcaatcctcccagcgatacggaggtactattataagtcctcactttatagatgtgcaagtttggacatccagaggagcatgttgtaggtcacccagctagagaggtacaggtagaggaaatggacccaggccagggtttgcctggctgccaaaggatgctgctgccctaactcccaggagggcccccacatgcaccagcccctcccggcttaggctcmtgtgactcccctccccctgacaggaagccttgccaccttgctgtccccacccctgggggatatcgctcagggatgaaagggttctggggctgcaggctgttgttggaataaatgagctcgtgtgtgtcgcgcctttctctcgttgagagagcatcaccctgtgcattctcgatgagctaacctgacctatagcagtattagatccgcgtttaatggacagccgtgtgctgcagagaatgaacagtcagtaaaggcctgttgactgtcagcaggctcggcttggctcagctccagcccaggcctggggtctgtgccaagcccagagaaaggtatagctcaagcccctagcttgggtggatctggtggtgctgtgtctgcacacggggtgccaagggctctgtcatatttagccctttgaatatcagccccagagccaatgtcgcagacatctgctttaaatggggaytcccttcctttagggtagagagaaaccttagaggccagagtcacaccgtccttcttctctgggatggcccccatcccttgtcatttcagatgcagcatagtatagtgatggaagcactgcctgggttccaaatctgagtctacccccacccagctgtgtgaccatgagcacctcatgcaaacactctatgcctcagtttcctcatctgtgaaatggggatgataatgttcctttcctcatgagtattgtgagaagtaaacgaattaatatatggcacattgccatgcacgtagtaagtacagaagagtgtttctatgatcgtctcgcatccatacctgtcgtaaattagtgtccacttttggctgtgagtgccatgagggcaggggatggcctgtcttcttcattgctgtgtcccaaggaaagttctcaggaaatayttgctgaatacatgaaggatgcatgagcaaacacatacgtgatcgctcccaacgtgcctgggggaggcaggggcagggtctgtgaatgctgctcatccacggagggcttcacaggcccagaatttaccttagattcgaagaygaaggaatcatctggtactatcttagtttcctattgctgctgtaacaaattactgcaaacttaatggtttcaaacaatacacatttatatcttatggttctggggctcagaaatctgatgtggatctcactggctaaaatcaaatcaaggggattattgcttcgggggccaccttcattccttggctcatgacatgcttccatcctcagagccggcaatggccagtcaagtccttcttgcatcttatcactgaatcccctgcctccctcttccacgtttaagggacccttgtgattacagattacacaggacccacccacataatccaggctaatctttttattttgtggtcagatgattagtagccttaattccatctgctaccttgattcccccttgccatgtaacataacgtattcacagcttctgcaggttaggatgtggacatcttggatgcaggaagagcgggaggttattcttccaaccacagggattttcagttagtcaggaagatgggaaagtgaatgaaggaattctccatttagctgccccaaaaccattttgagagggaaaggacttagaccagcgcttccttcagtaggtcttcatggtatctctttctgaattgcatggctccaggcttcagggatttttttagtcattttccggggatggtcataagtgccagcaagacaagcctcaataaaggccaataggctgggcgctgtggctcacacctgtaatcccagcactttgggaggccgaggcagggggatcatgaggtcaggagttcgagaccagcctagcaaatatagtgaaaccccgtctttactaaaaatacaaaaattagatggtgtggtggtaggcgcctgtagtcccagctactctcgagtctgaggcaggagaatcacttgaacttgggaggcggaggttgcagtgagccgatatcacgccactgcactccagcctgggtgacagagtgagactctgcctcaaaacaaacaacaacaacaacagcaacaaattcgctgggcaaggtggtgggcgcctgtaatcccagctacttgggaggctgaggcaggagaatcgcttgaacccaggaggcataggttgcagtgagccaagattgtgccactgcactccagcctgggcgacagagcaagactctgtctcaaaataaattaattaattaaattaataaataaaagtaaaagacaatagggcagtagcccagatgcagaatcaggacttgttcatggagcccctcccacgtgccagcgttggttgcattcagcagcggccccactcctgggcccatctttattgagcacttactatgcgaaaggtactttgccaagcatgagatgcccattccctcactaaattctcatgacagtcccttgaagtagtttcagttgtcagccccatttgacagatgagacagctgtggtacagaggggttttgtgacttgcctgaagccacacagtctgtcagtggcagaagtgggatttgaacccagggagttggactccagaatcttctctctttcctggcttgacctcctacttctctaccattcacgcacattgttccattgcagctgcacaaccaccaggtgaggacggaatttcgtttgaatccctactgcttagatacggagactgaggctgacaaggattgtgtggccagcccagtgtcactcagctgttcagtgagctgcctgggctctttctccacatcacactgccttccgtgtgttactaatgaagaatgaatttctagaaaatgaatattttcaaaacactccctgccacctgcagtccctttgaggagtrgcgattgtttgtagttccccaggccccccatagaggtaagcaatcactcctactttagaactgaaattgggggcgtctcctccctgccacccaggactgtcatttagccagccagcctgaagactgcagcaagcaggcagatgcaatgcttgcgagagtaaacttggccagtctcccaggaactccttaatgaaaaatttcattccggtggacgagagtggagtcgacacagtcctcattactgcccaggtctaaattaaacaagacaagggaggttcttgaggagcaaggcagaagttamtgaaggcttgaacagtaaattgcaggaaaggagcttctgtcggggaaggttctccgactttccagggtgcatggaaccccaatgcatttctcctttggaggatcaacggccacttaggttgagggtacagaatggggcacagtaaacccagcctcctcatccttccctctcttgctgggtgagggctgggctgcaggcgcggcccccaggactctgccttggtggctatggttccagaatggtgacgcccggaagcagacactccgcaacgtactgtcttctaggctgacagctcttgcctccccagcttgaatacatgctcagtgggccagggttgagttctggagtccccatgtccctttgtagtgacaccagcatctctttctagataaggggcttgcataaagaaatgccatgttggcttacaagtaggaaatcatgttctttcccatcaattggatttctaggtgaccacctgagatccgaagttctggaagtcaacacaccatccacccacgctccccttgcccacttcactctgtctctctcgtgcacaggtgcacgcacacagggctcaggctgcagtccgacagaaacataggcttcctgccattaattggagggccctgactgcagacacagcataactatctattcatagtctttttttaattctaagaaatgctgctctagctattacctacttcagggcaaatgactggctggcgttatcagcatttttcaagttataaacamcccctcttagctgggacccctctttattttcagtgttcttcagaatgaggagttggggcatggccagccggccctggctgtggcatggaggatggactggccctgggcactcagggaggggtggcgggggctgcaccccatggccaggggacagttacaggcaccactgtccccagatgccccagggaacactgtgtcccagctgcttctacgtaacaatccaggccatggctttccttgtcttgcacccatttcctggaggaaaagcgggaatggtttaggaatgggtccctgctccgtggctcctgagaagaattccctctctccagactaacgctggtgtccaggcacttttccgcctttagatccaaagctatggaggggcttgtaaacatgttgctttttgtaaattgaataagtggacttgtctagtttcgtaaacattgctggcggcatccggagccccaagaagcacgcttcctcctgaaacactgccctgcaggcaggacagctccccgactctggcatcagctgccatgtcttgagagtctactgtgtgccaagcattttacctgcagagtctaattttatcctcaatcttatgcagtgggtaccaggattttccctttttacagatgaagaaactggaattgaggaaggccgagttgctccccacagcctcacgatcgtgagaggcagggctgggactcatggcgtccaaggcgtttggtgctgtgtctctccctgagggctgcgtgcagcctccccttccagaccccgcacggtatttcctcatccaggaagacaggacctagggctggacggcagctacactcatgtcatgcgctgggagggtctcccggggtctccccaggaccacggccacctaccacccctgtcccctgaagataaatgatcgcagctgcaaatttcaaacagtgtgacgtgctgcggtcggcagccaagacaaaaaacccacagacgtttggcctttgaggcagaggaacaccacgagctttctgttgcttttcttttgatctgctgtttgattttaaaaaggggaaaaaaaaaatggagaggatcagtgagtagaaatctaatttgaaaaaaaaacaaaacaagttcacaaaaacaggaaatgtcgtctaccgtggaccagtcgctgctgctttgggacttttaaaatgacagcacgtcttatagacgccgttcacctctcctagtgagcctggaattctggggctcagaggagcaaggttgagaggtcgtggatgtaggaagggcggagaaaccatctcatgtgccccgcagcgtttgctccagggccggggctggtcctcggctaagctggcttccttggtttttctaaaggaagactcatgacttccctgagaaatgtttgcttacaaaagactgaaacccaccctgtggtgctgaaaccaaggggaatttaatgcaagagcaaaccctaaagccagaagctgggtttgggcctggccccatccccatccccatctcatcaggcatcacagatttaaggagtagggctgtgggtccctggtgctctctgagcccttaagtctctggtggggcttatctctgtgtctctctttctctcccacacagatacagacacacacagccacacacacaccagagctacctcagaatggtgccttcagcatagagcctttaatcccacatgggtccagggccccactggctcactgtctctgaccgtctgtgccacctttatgggaaagagagtcagatcggttcatgtatctctgtgcctcagcttcctcttctgcaaaataggaatgctaatggtatttctatcccggaatgtctgtgaaggtgccatgggttagacagtgtgctcaactcattcaaactcaggcaagtgtacccctgcgcctgatagagaatgagtgctcaaaatggggtgtgactactgtccttcctattgtacagcgtccctggtataaggagttacgtgaacaaacgttttcagagccacctcaaagagaacacaaccagcatagaaaaaaaaatagatcgtttcactgaaagaaccactataaatactccatgataagtcagatttctggaagatattgtataattttcaaagcactgccacatacatggctcaggcgattcccccaatattctgagatattactgagactaataaacaaggaaataagaagttaaggtattgcctgaggttgcactgtctgcaagtgatggagtttaaactcagatccacgtcccacctctaaattctctgtgggtttgttgttgtttgcctgtttggttttggggggtttttttgagacagggtcttgctctgtcacccaagctggcgtgcagtgatgcagtcatagctcactgcagcctggacctcccaggctcaaaccatccgctcccctcagtccctggagtagctgggactactggcgcatactaccacactcagctaagtgtgtgtgtgtgtgtgtgtgtgtgtgtgtgtgtatgagattttaccattgttgcctgggctggtcttgaattcctgggctaagccatctgcccgccttagcctcccaaagtgctggaattacagatgcgagccactgtgcctggccaatttggtgtgtttttaacttcatcagaggtaaaagttttcataatccatcatatttctctttataccttggctactgggaagcacaaactaagtgtgatgcccaaactcagcactgccctaaccgtggtttttagtatattttgtatattgactgaactgcagtacttagatgaggtagattggttttctgaaacacagtgtaagtgcctctgtaaagtggatgaattgtgcctttgcagacgttcaaaaatggtgaggatgagttttatttctaacacgtcatcgtttctgyttgtggaagaggacgggctatggtggacgtagcctggcacctgttccttcctgtgatctggttctctcttccagccttgctgtctggagtcgttgctggaaagagtgtccaaagaaaacaaggccccatccccctgcaggtcatctttctgtttcctgctgatacctggggggaggtgaggggagactttctcaaaggccctggcagtgaaacatcatcaaagtgagccaagacctttgtgaggctgagatggggatcacacctttccagaacgctcataagtgtcacttcctaaggatttcaaacctgcacagacaaacccacgtgtcctacgggaaggctgctctgtgtctaggggaaggctaatgactttcttggcctttgtccctcagttctcaggggggtggtgctggcgtgccctgtcagacccacttaccccagacaggagcctgacatgcctggctgagtcctgcctcaggactgaggccctgtggctcagttttttgatctgtggtgtgagcgtagtatcacctcccctgggagtcatgatagcartcagcagtattaacaacaatgacaacaacggcagctgggcccctcaaggactgtatttaatactcacgatatccctaatacagctgtgagccctttgttttaactcattcctgtcttaaaatcgctgatgagaaaacagagaggctgccgacttgcccgggatcacacagcaagtacacacacaacatagtcaggacagcctggcgggcggggtgggcgtctggggggccgtgggtctgccccaggcctctgcctgcaccacccctaaccctgaaggcttgttcaatctgtggcctgcagtgaagtgagaatttgcgctcccctttcccgacactcactccgataaatcactccctgttttagttttattgttagagcgagaatgaaacctccatggagtgccccatatatctgcctctggcttctttatagggtctttggcatagagagacatgcccctgggaggtggtaagagttgggttagccaagaggtggtgcccaaattagactctggggtgaggggctgccttgctcaccctggccaggtacccctaattactgtgaccctaagtggccctccctggaaaggggctctgtcgtatcactttagtgcccagaagaccgagcgattggactgggtgttttctgacctcttctcagagaaaaacagttcctatataaaacgaattctgttcagtgtttagaaaggaatgaaattttgacacaagctatgtggatgagccttgagggttcatactggggaagtaggagaaagacatttcacagacatggtggtaagtgtatatgtatataattgaacatataaggcattacaggcaattatgtaaatttgagttgaaggagagctattagaggtttatagggagagtgtgatatgatctgacattttaaaataatcactttagctgctctgttgaaaatagattatagggaaaagagcagtagtgtggtgaatagttaaagggctactgaagtagtcctaaacagagaaaatagtggccttcaagtggtgagaagggcattatgttaactgaaagaagccagacacagaaggacaaatactttaccatgtatctgacggcacccggagtagtcaggatgcctcaggaggatggctaccaggggcttgggggaggggaatggggagttcatgtttgatgggtacagagaatccatagggaaaatgaaaaggttctggagatcgggggttggtgatggttgcacagccatggcaatgtgctgaatgccactgaactggaaggagaagatggtacattttgtgttgtgtatatttcaccaccatttttttttaaaggggagacttctgggtggttttctgcccatgtcgctacctagggagctcttgccatgtggaagcatttgttcacacagggttaggagcagcagccagggtcccgggaggcaaagaaacttgtcctcaggcctcccctctgcacctctgaggctcaccgtgggctttctgggccgytccttgcccagaacagttgctggaggactcccttagtctttccctccaccggtggagctgccgcagttgccttacagagcatttgagatcggctgtggtcaaataatacacaygttagagtaagatggactgttaaatacaagaacacccagttaatattgaatttcagatagacaatgaataattttatagtatatgtatatcccatgtgatatagggacatactcatactaaaatgatctgcaactcccatttaactagtgttctgtattttctttgctaaatctgacaagcctgtgtgagaggcaacccaggagtggaattctccccagtgtgtcttggtgctttagggctggaagtgggtggtagagtgtcagccttgcgagccccagttctggtatggactcttctaagcccagcgcccccattttgtagccacttatctttgagcacgttcccagctttctgactctcaatttccttatctgcacatgtggataataatggttccctcctcatgcaatggcagaggatgaaatgacagtagctgtgctgtcgttagcatagcaagcgttgtgttcgtgtcaacacttcaggttgtttctgtttctttgccttcctttatgaattaaagatgaccattttctagatgagcctgaggccgtggtgccgaaacaagaaaacagcagtgaagacctggttcttcagcccagcctggtcgtatgggttcatgacctcgagtgagtcagttcacctctctgggtctcagttttcccagctctaaattcaattacacagttctcaggttcctttcaaattcaaaagtgtacatgatacctcaataaagctgttaattttttttttttttttwaattctgagcctgcctcccctgtgtctcctccccgccgtggttgttttctcacctaatacttgcaatcgtgggaagtgggtgtcacttctccacttaaataagtctcaggactcagaaaagttctaagcccctaactcaggggcacataggtcttgtgtgctggagcctagctttcaaccctggacttcctataggccaattcttatcaccctttacacaccagggattggttttcttggagagtgggcagtgggtctcacagccccaggtcaacccacacaggacggatggtccgtgggcaggttcatcactcaccagactcaagcaggacaaggtagggcagtcaccatggctcccaagggccagtaggagcagtgtatggatgatcttttcagctgctttgcctctgccatcttgattaatcaagatgtggccagaccacacggagctcttcagtcttgacatcatcaatccctttgtgtccatctcttgagccaatgaagcaggattggcaagaacaaggcctatggtgaataggcctgagccaagcctctgttgacagaggtcagagaagacaacagagagatagcagaaagaaatattgcatatttcataaggagttctaagtgtctcatctagaatccttagtgaaatatgtaatcagagactctttaattctttgctttaggcctagcttcaaagttcaatggtaatttttgtccttttcattttctgacagaccttgtcaaaattgggtggtcttgtaggccagtgaagtccatatttgtacatcccctggtgcagagtccacgcttgaagcagacactggatctgccgttgagcatattcaaagagaaaaacaaagcagctgaattaaaatgaaaaactaaggggcttgtaattaaaaggctgtggtgtaaaccagaggcctggaattggtacctggtaccgcaaactaaaaatagactctttccacagaacaagcagggaaatcccagtgatcatggaccactgggaggtggacagaggaggcaacatgcatcttcctcccctcctctcccccaagacagagaagctcaacaaccctgcttcaggatggggttttctggaaagggccaggctsgtctataggtgtaatgggctgggaaagggtgtgccaggatttgagcggcatcaaaacctgctgtagggctgagacattagagtgtaattcctcaaaaatatccccgacatacacattttaactgggcttagatgtggttgtatatgtgattagattacactgcctaaggaacccatagcaagatctgatatatctgaacaatctcatctatcttacagaattcagggccctgaaaggtaggatgtagggcagataaatattggtggatagagtaaggaggctattagggacatgcctgggactggtcactatcatgacaaaggatgattatgcccacctggcatttttgtctggtccaccaagctgccttagttcaccagtgtaattgtggataagtgggtctctagggatccaaaaggaaacagacatttatttggccatccacccccaccccaaatgatggtgcactcatggcaatggcaaattacattattagaaccttctagaagggaatggttctaataatgtaatttgccaattcctggaagtccctaaggtcttgattggttaaattttgtgttgcacccctcaggggcctacattcaagatccttcagggccaaaccttgctcccagctcatcctattcagcccttggaggagcaataaatgtgttaatctagccaagaatatacagcaaggccagggaagttggccatctgctcaggtgctgaagttacaccaatgcaaacagaaatttactcctcaaatcccagcacagactgtggctatggggccagcaggaaggctgatgggagtgggcaggccccaggtagcaggggtctggggaggcacattcaccacaccttggagcagtgttttgggtattggtagagtggagatgataagactggaccaaccagtccaccacccagcacatggtaggtgttcctacatgtttactgaatgaatgagttaatcaactgattttataatcgagtatagacagcagtctacactcagagcccaagtagaaaatgcttcattctccaatccctttcagtcattcaacaggtgtttattaaggcagtgttctaggtgctggagacacagccatgaaaatggcaaacgagctccttgagcataggaagcttatggactagtgggaggataaggagacggttagagaactgagaacagggaccctaagctactcaggaaagtccctccaaggaaatgatatcttakccaagcctggcaagcaagttaaaaatcaggcaggcacaggggagagagacgtggatccaggcgtggatccaggcacagctgtgycttccggcatgtctggggataaaatccagtgttgaaagagttgatgccctctggacatagcatgatgttaaaaacaatgtcagcaataatagtaataataataatagctgcaatttctcattctctacatcaggagagtcttcacttctttccctttcatgggctgcggctttaattgggtaagtggttcctttagaaacaattagggattgtaatcagtcgccattcagaagtcttcagcaggaactgattggcaggtctcttccggcttgaccttaaaacttccccatagctgtgactaatgtaaagcaaagcccggaggagcatgatggatttcagaagaaaggaaacagaaatttggatgcgcccacagtctgtgcacacacttagcacccagcattttgtgttctatggagaaacatctgaaatgatcagaccatcttcaactccaaactcttccttaaaaaaaaamaaaaactgagttgttctctttaaaaagcaaggggttggaggaggaatttcagacaggagccacccatctgtctgaggttaggatgaatttcagagttcccaactgtgttttacaggtgccctgtggaargtgccagctcctgtacttcattggccatgatgtgctcttgtcccactggtttgactcaagaaaacactggggacccttgaagtcctgaactgagggccttgatcctcctgaagtcccaaccctacccgggaaggcttgctcccaccctaccctgctgggcctctgccctcctgggtcccaccagctcttagactccttggagggcagaggggagaggataaaaagaagccactgagaaaggcagacatgagtgtggagatggacagaaaggggaagctccaaggtagatggccagtatctttcttccagaatcaagagccagttagagcaatgtcgtgctggttaattgtcagatggaaaaatgtgacttacaaaacagtataataccaattaaaacataccccaaaaagctgggaaaacatcaaaacagggataataattacctctggttaatgggaatttaggggaattttattttygtgttattgttttcctctaattattaccattagtttctgcagttgttttaaggataacagcaagcaggaaacaaaagagacagaaaaracacagaggccaagatgagctgacagaagcagacacatggccagaatgaccaacagactaggggagactgacctcctgccccacatactctgtccccttgagcaagcctctctgtgacctacagcttcctcccctgtgaaatcgtgcttcctgtcctgaccatcttatcagttgtcctgatgctcaagtgagaagacaggggacttggcaaattgtgtagaggatgattgtgagccagtcattaagtactgaggattcaagcagtgtttctctgcagacagttcacccaaatgatttgtgaagaatgcagattcctgtgcccagattgggtttctgggagcagggcccaggaatctgcattttaacaagcccctgccctctgactttgagatccaggcatttcagacagacagtatcagggcaggaacatggaaggatggctgtcataggtgccatgagtgacagaagcagcgtaaggtctagcgtattgtcttctcgcaacttgaaccttgctggagaagtgagaagtgggtgtgcagaatcgtacggtgtgcagacggtggcctggtgaagtgcygtgtacytaggagttgagggggagctcgatggcgctggggcagaggtctgcggagagtaggttgggtttagaaaaatgaagaggaggagcagcacaggccatctggatgggggagcccctggtgagcaaggtccaccaggtgggagggcaaggcctcctcctctggccgtgcgtgtctggctgctggttggtgtcggggtggttttgcactttctgtttcctgatctcacctgtcccaggacttggggctctaagtagcattacactggctgggcaggtagtcaccctcatcctctgacctgtcagactggctggtgtcagytgacagcggagctacactgaaaacagagacagtactggggcctccgtctagggccttgtactcactggtttgcttccagtcgactctgaaagctccctgctgcttcctccaccattccttcactcgttctggaggaactacccgacctgggttggcatcctgcctctgccactcatttactgtgtgacctgagagcagttaattaacctctctgttcacacggcctcttgtatgacatgggagaagagtgactcttgccacagagggttgtcataaggattgtccctgagataatccacacaaaacctttgatgcagggcctgacatttagcaagggcacaataaatgttagccactgatacaggtgttcacctggcaactgtttactgaactcctgccatgctaggtgtgagggaggggctagaggcaccaagagctcatgatgggcccggatgggtatgaaatagcctcctgtgacacagtatgatgaaatggtgtgtctcggatgcaggtggcacaaagtgtggcgtggctggcccagcgacgggcccagaggaggagacacttggttggatcttgaaaggacagaatgggaaggcgagaggacattccaggtggagggaatggcatatgaaaagtcccagtccaggatataacatcctcactcctttatcctctgctttgggaagaaatggggagaggagtggcttctgctcgtccacactgttcatctctaggagtggccaggttgaatccaaggccaacttggagtggacggaaggtgcagcagtttcccagaagggctctacaaggctcctgggttgcagctgccagaaaagtctgttccccacagctccctggtcccagctgtgaggtagttaactgcagctgcctcaatgtcaaagccagggagaggatgcccatcttaccttctgccctggactgctgcagctgtcctgcatcctgaacatttgctgtccgtgctccacttacgagctgtcttcctcaggccagtcctggctgccagctccatttcatcttgtttatctgtgtgccttgacattggctgtctcctgcatccttccaagccagagaacccaaattgaccagaaccctcatcggagggctaacttactgtacacgacatggcttagaggcatggagggtgaatgtatctatcacccagacacggctgcccccgccctggaaaacaagggcagcccgaacagggacactcccaccagcaaactaaacaggcagttcaatccgtaagcaaaccaaagccgaaagaagtacaccaaagagatgtcatcctcctccagcctgtgcagcgaggtggctgtctatgctgctgagacctaagagagtaagtcctgcttgggctggaagtatgaaaacagacctgaaaggcttctcccggttttattttggggggatcagaaggagaagaggggagaacctggtatccctgttctgaaaatgggctcgagggctgtggctctaaggccacattttgtaataggagagtaagcaaactgggtgtaaaccccygcacccctgagactygggaccacggactcagcctctgcgggcctcagcgtttccatctgtaaattggagctgagcatgtccacctctcagggttgaaaggattcggggtataatgtgtccagtttccagcaccaagtaaaggtttcctatttttagttcccttccttccctggcataatgtccatccgtgtcatgattccaaaatgtagttttgcaccaacgcaactgcggcctccttcaaggtgcatttgtttactaaatactgtttaatccccaacgtactgggcattgggaatagagctgtgaatgagacagatgagcctgccccaggggctggcagcccagcagattggcctttggtggcattttgggggaatcagcagtgatggcagaaagtccaccccaacatcctcccctctgtcctagggcaggagaaactgcaaccagctccacagctatgctcggtccctccagggaagaggattgcgctgctggtggtcagttttatttgggtacacctcagcatcagtggctcagaagcaggaggtggcaggttatggccatgccctgtggtggctgggccccctggggttcgtgagctttgctggcatggacctggctgtgccaggagcctgtccttctgttcgcctatgtgccataagccagaccccagcaaggcttctcccaaagaygtgggtgcctcagaaagatgaaagcagtgatccctatttccctaagggcctccccagcctttgacagggtcctggcagaaaagctagactcagtggctggttttcgtaagttttgaccccagggacatttatagatggcctgaaaactaaatcaatggattttacttactttttaaaaattcacctttcatcacattagaaatagaccttcttgccctatctctgagtctcctcacgtctcttctcccttccccaacccaccctctaagggtctaagggtgaagtaacaggcgggagtgcctgtcatgcacagcactaggtaataaaacaccttttggggcttagccaccaaatgtccctcctgtccaagtgtccatatccaaacctgagctcagtcaggtatccgattggtgttgctgtcaccggggcatttgccacacccaggtgctcacatcatctattgatacccccagtctccagattctttttggcatcctcctccccagcttcctaatcactgatgagaccagatggcaaaacaaatggggactgattttgcagtgacatcggaattggaagctttctttctggaactaagtattaagtattttttttaagcacttatttccttacatgtagttcacaaagagggcgtcagccctgtgctttgaacttgacatgcatcgtctcacttaatctttgctccacacccttgtgtagtaggtatgaccagccctatgagagatggggaaactgaggcccagaccagtgaggtgatgtgtgcaaggtcacgcactgggattccacccatgcaccttgtctccagggtgtgtcctcttcccacaatgctgttctgccaccgggttctttaactggaagatgatgtagataagacatatcttgaatgtagctgtggagggcatgaggccagactgtttttgctagatgcaaaatctggagtctagctttccagatcccacagggaaaagacctcagagtagatccaagatttccccatggcatggaagaaagaggaaaggggacatttataaggcctttgtgggaggcagtaacactgactgtgggtatcaggaaagggccttgcctgattctgggggcacctttaaacccagcaagttcccccgtgttcaaccctccctcccagggctgcatgatggaacccttgaaccaggatcagttgttgsgagtcgcagccaacactttgacacacactgtgtttcaggcagtcttctgaatgctttgcatattctgtgaggttggtacttccattaggtgggtgcaaaagtaattgtagttcttgtcatcaaaagtaatggtaaaactgcaattacttttgcgccaacctaatactatccctaccttatagataaggaagttaaggcacagagaggtgaagtaacttgcctaagatcacacatcattaagtaggtggcagaaccagattcaacccagggagattggttggctgcactgatcttatctatactgcctctgaggaggggaaccctgcttttgacgttgtaaggtaggaggagttgggtgatgggtctggtttctttgaaaagccagcggggggcgctttgagccttctgatgatgccatgatggctgccatgcccccatggcccagccctggcaaaagtgtgtgcctgtgggggctgcccaggaatgtgggcttatgcctcctccccgccaccaccagcaatctctgtagcttttggctgggcactgctcctccaaagaaggcagcagggcttcccctgccaggagggccagcttccgccagcagagctgcttattgagaggtacctggtcagcactggcgccagaggggcacagggaggtgtttgctcaggcccagcccatgcttctctgcagaagtggacgtgcttttctgtttatttttcttatttaaaaattttaaatccaactatcttgaaatagttggaggtacagagctgcttgaggaaaattcagccccaaaattcatcagaaagatgrttggcctcaggatcacaggggcacgatccctcctgaaggaccagcagttccgggccctgtgtaggcacaagatgaatgtcattcatttaaatctcaccccgggcccgttgtatagttgcagaaactggggctcagagaggtcagcttgcccaaggctgtgctgctaacaagggcagggctrgaccttaagatccggacccaaatgcctgctgtttctcccgcccctagttctgaatacggtcacaggtggaaaacggggtggcctgtgataytccagtcccatgtttcttactttgccatggggaggaatgaggacctggggttattgccctgtagttcattccacccttcaccccatgggatacccagtcagccaccaacagccttycctggtaggcactcagggaagtgccccagggtgaggaggatttgtgagaactggcgctctgcctcctgggagctttatggcaaagtaacagcaagagaacacagacaaaagacagataatatggagatccagaggaggagggtttgggrtgcttagacaagggtggggcctgcgtttatctgataaataacacagtgattctgtatcatcatcgtgttgtttacgtgaaccctgccaggcaccacatgccctcatcagggcaaactgcaaaattgccaggtttgcttctgttctgcaaacattttttgagctcctgctctgggggcaggcatggtgctcaacacaggggattccaggatgagcaaggcaacagtcctgaacttcagggagcagaggtagggrtcyatgggtaaacagacagttacagtatgttgtgagaagagagtaagctccagagtccagttacctgggttcaaatcctggctgcaccaccggctagctttgtgacttaaatgaccacctctctgggtttcagttgcctcatctataaaatggaaatataatacgtctctaccttgtaggagtgatagaaggactaaatgtgattacacaagagcttaggacgatgcttggcacctggcactcaaaatatattagctcttctggtggtgctggtggctgtgctgtgaatgataacagcaataatggtaaaaataataataccacgttctataagagagatgagcctagatcactggcggagcaccaggaaaaggggatacctgactgatccaagcctggtggtggggctgggtcatccgagacatcatcttagaggaagtgaggaatatggtgaggtctgaaagccccacagttagcgggaagaagagagtgagcaaatccagagagacttgggggcargggacttgctcctgggcaggtcccttaggtgcaagaaagcgcagtacttctagagaaatcacaggggtccagtgccctgcatgggacagggctgctgagagacagagcctgaggggctggcaggggccaggatgcagatgctgggtgccaggctcaggcatctgcgctttccatggaaggcagtggggactcgtcatgggtttaaagcacaaggacagcagagttagagctgtgatcagagcctctgttttggtctggaggggacccaggcttggagcccagaaactaggggattgtcagcagcagtcgaggctcaaggggatgtggtttgtaccagggttgccaggatgsggggttgtggccaggctgtggggagtgggtgcctaggtacctggcagggaacctgggcagacagcagtgccattccctgagatgggacacaggaagagggcagtgaccactctcagacattccaagttggaggttcctgtgggacattccatgggcaatgtccaacgggaaggtgagagcatgcttctcgcctctggtataaatcctcccttccccaaagttccccctgcaagataccatccctgtgcctacagaatctggggaaagaacattccatggagaaggaacaggacattcactgccctgcgtgtggcatgttcagtggaaggaaaggaaaggaagaagagagagagaagagaagagagaaggaaggttggggagggccattttgtagagggtgatgataagaaaaagaccagtgactcacaagctcatacagagaatgcccagcctggccgagctggagatttacccagaggcatccagcagagtcccatgtatttccagatgtttctggttagaagttcgtataactttcagagaaaatgccctgccctcctggattctggcccagtttgaagagcaccccaggctgactgagcgtagcaaagcctcagagaggcagtggtgggctgttgggctgggacccactgcacgtacaactcgggaagcccacctggccctctgtgagtctggcctgtgaactctgatttacccggagttggcagggttgggggtcttagagtagccctttgagaagctggttcagttctgaactccatccaggtgtccatgaaagagactgcttcgagtccctttcagtcccccacacagcgctgtaggtgtactagaagtcatgtataaactgccctgaaaatctgatttttgaaagcataggagaaatgcatccttctgctgcataaagcatcttcattgtgagtcttgatagaaaccaagtgtggcttcagggcttaagaaggccaaacctcaccctgtgacttacacaactgagaccaggagtatctatgagaataaaatgtgactttcctttaacaccatttatagatgatctttatgggatattctgcctcagcaattagctatgggaattttaaaactccataacaactttaaggaaaggaagttaatcagaacttcccgactaagaactgagttcaataatcattgcccaaggggcttccctgtacccagaagccacgtagatctgggctgtggatcagcctgcaggctccttgccatcccccgtgggaatgactgaggtcacacgggaggtcatcgtgggggtggctgacttgggggccaaagacatgtacttcagaacaggacagccagggtggaacctgggcctcaccacttgcaaggcctgagccttgggacatgaattcaagccctctgagcctcagttgactcatttgtaagttgsggatatcactttggggattattgtgaggattaactgagatggtgactgtcaagtacttcgtgggatgcctgacgcatcacagagccctgcaggtgagtttgtagttttcccttgtctggccaccttggggtcatagattagttagtgaatgatcagttgatctagagccttctagatctttctgcttcattccagatctcgcattgacccttttgcccagtgccttcctcggggcagtggaggaagacacagagtggaggtatttctgactcctcttgagcgcctgtggttttgatgtttttcaaaagaaaagaacatttcagaaatagaggagggagaatcccccaccaggcagttttgcagggagggcctggcctgagaatgtgctgggcatggggaggtgaaagatgagccaggcggaaagggagggcgaggctgtcccctgggaaggctgggtggcctgtccccagctgtcactggatgcctttgttccctggagccaagaggcctcccttggaggcatcagttgccacaggaagcagattcattcatgaaaacccaccccccaggccccgatcctacttgcttttttgaacctttctgttctttgctttggctcagagaatgccacttagtgtataaaaaaggatcccaacgtcccgccctgctggaccggtgtaattatgtctgctacacttcctttctggaaggccctggtcagggggtgctgcagccttcccagaccccgcgggctcatccttcttcagcagaccggcctgccctgtcattttgggcataaagcctgtgcagggacagccatggagcccttccccttcccgaccagctttgaggttcgcagaggtgccccgctctctgtcgcctcaaggctgcactccctgttcccccacccaatcctctcttagatggccttcggcgccagctcactcctcctctgtgggctttgcatgaatacttctttcttgggaaaatcattccctgctctcccaagctggaacggcactcctgtgccatgcgtccatggcacctgtgcttaataaaagcagtgaacatgaactaaacacacacccaggcaagggcctggtctggccttcctgacttcatcctcacacccgccccatgatgcaatgaggcgtttcctgagcacttacctgcaggggcaygtgcaactccctcctctcatctgagctttacagccacctttaaagcagggagtactgtttggctcattttacagtgaggaaatagaggctttaggagaaagcccggacctcatagctagtaggtgctagatctgggaatctgacactagygtcttctcttggccactaaattacactccagctgccacactgcattgccatcttttctgttccttgtccctgttagaatgtgtgctttctccctgaaatcatatcttgcttcaaactgggctcccccagcgcctcaggctgtggcctgtttgcataactggcagtcactggactgattcaggccaaggatggagctgccaccaggttgcagggtccctcctgaagacggaggaccaggctgggaggtagacagcctgctgggcaggggtgaggggtgagctgaccagtctgaagctcatccagggcaaagcgggacctgcaggtggcagacgctgtcagygggaggttgggaaccaacgccggtgtgtgccagaggagcccgggtagtgggtgcgggcaagagcaggcctgagcgttctctccctctccacctggaacaccctgaactcatcactttttgggcttcaaccaggggaggcagggaaagtgaaaggaaaagtgacatcagccactctccctccttgtcagcagcttagggcaaaattctagttgggaaaggtgtcctcatcttttcattactacattggcctgaatttctagaaggtagagtgacttctctcggccagtgtattcatccgtgcaccaggcatacagtcagctattctcaccatcatctataaccacaggaggtccgtggcaccgtcatccccattttacagatgagaatgctgagtctcagattaagtaacttgcccaaggtccacagccagtaagtactagagccggattttaagcccaggctgtctggctgcagagcctgtgttctgaaccactctgctctgctgccccttgatggaaacagccacatagtaaagaactctatttttttcatgagaaaaaacttttaactgtgaatattaattgcttgtcccttaagagcagctgtgggtcaagtgacacagtaagttctttgcagacttcatccctttaaacctcataagagccagtgaggtttgtgctctctcagctcccactttactgatgaggagactgaggccaggagagtgaatcttactgaccccagatcatggggctggtcagggccattgccaaattttacatccagattggtctgcctgactccagagtctgatctccagcctgtgctgatgagcttgctcatctccgcagagttccagacatcctagggagagtaaacctttgttccatcaaagcaaatactctccatttttgttcagtatttattgaatgagatcagggagacactgattttctgtaaaaattgtatcctgaaatcaatgtatttagtttctaccacttagttttagtagggtcactggcctttaaagaaaaaaatgcaaagacttttcccagttcttgcctcacttttctttaatgagctctgaaatcaggccagcccagggggacctatcccacgttccctattctggataataaaatgggtcactcacttctttttagttttataatttccattgatcataaatctacatgtgttgtcaaaatactcctctgaggttgatggaaggtagcaaagatggtttttctatttcataggaatgttatggcaccacacagatgacactccctgccctctcactctgccctggaatccatccctgcacctccaacaagggctgctgggtggatagaaggagaaaatccctctttttgctctgctgtccagcagcacaacaaaaaggcatatttgggttccagtctttgctctgctgctttctgggagtgggtggatgagctctcatctctgggcctcagttttgccatctgaaaatcagagggtggtatcagataatcacaaaggtattttgtaactctgaagttctgggttctaaggactctgagatgcaaaattatttgaaagctctacaggcagaagaatattaatacctctgatgtcatgcaattgagggtgtcttattcacctctgggccccgggtctgtgtccctgccattgtgtgtgactctgttcctggatatctgtatcttcatgtcctcggccatggcctaagaagccgcagagatgtctgrcttcctcagtgaacagcagatggatggatttagacgtgcttgtccctctagcactccacgatggtcttcctgttccactttcactatgattgagaatgggccgtccttcttgaaagaggaaaaaggcagtgaagtgataaacaaaatcttcttagtactctgcaaagatgttcatgtgttgccacaaagctaatcacccttttctgaattctgcaagtattgggcaccaagtgcctgggacactgagatacctgggccttatcccagctgccctggagggagggcatgagttgagctcacattgttcatagtgacattaactatgatcaggatggagcaggttgaggcaaagggrtgaaggtaaaggtggtggraatggctccgttggggccccaggcttggtggtggtggttactggggagagaacgagggtgtcttccaggcaggggtaggaggagggctttggagccccatctgcagaactagctccacctctctcttgggggaggaccagccttcctctcactggaagcatgcaacatgcagaaacgaaaggcccagagcatggctcaygcgtgcctttggaacaatggagaaatcgggtattgttaaaacatgctgcttgactaagaaataaatggacctctttgggtgcctctcaattcatagttcagttactgtgaaattccatgaatcctttacagtctgttaatacatattaatagctaatcttgatattgccagaaaattgctcttcagacctccaatttgcttaacagctgccaatctaagttgccgccaattgcctctatcggtcttctgtgtcagtgagatattaagtcgccatgagccaggcattttgcacagatgacaaatgtgtttggcgttcactgcagaacccgctcatgtaaaagcgacgctcaatcatcagttctcaaagtgaaacagagaccaccagcctcagaattggcctgatagaatcatcacggggcagcgatcaagagcaggttcccaggacagcccgacccactgaaccagaattactcagggtggtgtctgggaaccmgcattgcatcagattcccgctgtgattcttacatacactgaacattgagaaatgctgtcaggtgaaaggcaaagcaacattcctgctatcctgcccccggcacttgggaaaccaccctctgtaaggtttacagtagctacttcctgagtgcctactatgtgccaggtaccatgctatgtgctttccttgtgggctctcmtctaatcctcaaaatgaccctgagaagtagactttattgttgtccccattttgcagatgaggaaactaaggcctgaagggctcaagtgattaggccaaaatagaagtagaatattctggtcagtctgggaagagaaccaatgaagccaactggttcaaagaagggagaggccaggaggagatcctgaagggaggcaagcccctgcctcccaagagcatcaccctctgggaggcccatcgtggtaggggaggttgacggcctccctggctaggggaggggtaagccacccgggactgctcagtggacccatgctcctcctcccctactcctgccagcagcgacttccgaggaccccaaagcactagccagcaggtgctcagcctgcctgcccttacttctgatttcccaagcagtgtgggagctgcatcccttcctcaccgttgttcctgttccgggccaccattcatcggaaagcaggccagcttggcagcagccccattcctattcctgcccccctccggcaccctgcccaggcctccggaagcccaaacagctgatctgagatgtcaataaggcccttccagctgcacctggcctggctgaaagggagccccgggggtaccacacagcctcagaccaagtccttcctgggcagcccttggcgccctccccctccagcgtgatttgattcccctcctcttgtttcttggcctcaccagacgggtggaaagtgccagcgtccctccctcatcaaaagctgttgcatttctacccagggctgagagtccccgctcttctctcttggcctccagccccagagctgatgctaagctcctgtgtggcagccacaggctctaagccagaaatctccaccagaagatgaggtgggggctgcgggtttaggcacaggaagcccacgmggcctcattggccgtcttgtgacccgaacaatccctgctgtcccaaagtcattcatgcattcaacaaagctttcagtgtccaccgtatgtgaagcactgggaatacaacagtgaacaaaaattagtgaaaactacctgccatctcagagttaacgttcaagaagggagagaccagcaaaataagtaaattgagataaactaaggagataagtactacaaagaaaagggaagcagggaaggggatgggagagctgaggttccagaggtgtctcttaatatccaccactgagtgtgagccttcctaactgcacccagggactcccacagtctggctggttccgccttgtctttctcttgcagttgcccacaggttccactaagtgagcaggggcagctgggctggaggcagtgggggctgagagcagccagaggaaggcacccccttactatcctcaaacacctgggggaggcaccaaccctacagggatggttcggctcacaccactaaaatgattgtagctaacatttaagaatacagagatatcacatgaaacctaatattctgacttctctttttttaatttatatttttctaacttttaagttcaggggcacatatgcaggtttgttacataggtgaacttgggtcatgggggtctgttgtacagattctttcatcacccaagtattaaacccagtacccattagttgtttttcctgatcttctccctcctcccaccttccaccctccaaaaggccccactgagtgttcccctctgtgtccatgtgttctcatcatttagctcccacttataagtgagaacatgtggcatttggttttctgttctgcattcgtttgctaaggattatggcctccagctccatccatgtcccagcagaggacatgatctctctttttttatggctgcatagtactccatggtatatatgtaccacattttctttatccagactattattgggcatttaggttgattccatgtctttgctattgtaaacagtgctgcagtgaacacatgtgtgcatgtgtctttataatagaatgatttatattcctttgggtatatacccagtaatgggattgctgagtcaaatggtatttctgtctttaggtctttgaggaattgacacactgtcttccacaatggttgaactaatttacactcccaccaacagtgtataagtgttccttttyctccgcaaccttgccagcatctgttattttgactttttagtaatagccattctgactggtgtgagatggtatctcattgtgggtttgatttgcatttctctaatgatcagtgatgcggaacttttttttgtatgattgttggcctcatgtatgtcttcttttgaaaactgtctgttcacatcctctgcccacttttttatggggttgtttttttcttgtaaatttgtttaagttccttatagatgctggatattagacctttgtcggatgcatagttcgtaaaaatttcctcccgttctgttattggttgtctgtttactctgttgatagtttcttttgctgtgcagaagccctttagttacattagatcccacttgtcagtttttgcttttgttgcaattgctttcggtatcttcatcatgaagtcttttcccgtgtgtatgtcctgartgggatcgcctaggttgtcttctagggtttttatagttttgggtttcacatacaagtctttaatccatcttgagttaatttatgtctgtggtgtaaggaagggattcagttttaatcttctgcatagggacagccagttatcccagcatcatttatttatttatttatttatttatttatttatttatttattttttgagacagagtcttgctctcttgcccaggctggagtgcaatggcatgatctcggctcactgcaacctccgcctcccaggttcaagcaattctcctgcctcagcctcccaagtagctaggattacaggtgcccaccatcatgcctgggtaatttttgtatttttagtaaagaccgggtttcgccgtgttggccaggctgttctcgaactcctgacctcaagtgatctgcctgcctcagcctcccaaagtgctgggattacaggcataagccaccacgcccggcccctagcaccatttattgaatagggaatcctttcctcattgtttgtttttgtcaggtttgctgaagatcagatagttgtaggtgtgtggtcctatttctgggttctctattctgttccattggtctatgtgtctgtttttgttccagtaccrtgccgtttcggttactatagccctgtagaatagcaagtagggtagctgatgcctccagctttgttctttttgcttaggattcccttggctattcgggctcttttttggttccatatgaattatagaatacttttgtctagtactgtgaaaaatgtcagtggtagtttaataggaatagcattgaatatataaattgctttaggcagtagggccattttaatgatattgattcttcctatccatgagcatggaatatttttccatttgtttgtgtcatctctgatttttttgtgcagtggcttatagttctcatcatagagatctttcacctccctggttagctgtatccctaggtattttattctttttgtggccattgtgaatgggagttcattcctgatttggctcttgacttgactattgttggtgtatgagagtgctagtgatttttgtacactgattttgtatcctgagactttgctgaagttgtttatcagcttaagaagcttttgggctcagacaacagggttttctagatgtaggatcatctcatctgcaaacaggggtagtttgacttcctttcttcctactcaaatgtcctttatctccttctcttgcctgatcaccctggccagaaattccaatactatgtttaataggagtggtgagagaggtcatccttgtcttgtgctggttttcaaggggaatgcttccagcttttgcccgtttagtatgatgttggctctgggtttgaattctgacttctcttgagaaattgaaacatctcgaaagaccaggtcctcaattccctaatgacggtatcagtgagatctatgtggcatcagccaccttcagtggcccagtggacgctgactgggttcattcccattcaaggtgccgaggccattcatttctatttcctgatggttctggagagcctttgagtttgtgactctaacccaggtcacccaatataaaccctgcctacaaaagaagtactttaactacactagggtgaaacaaccctttctcattgctcagcaaatcctgggctttcctttctgctcatttttttctgcctataaagatcccaaggttaaaatggagctcagaactatcacccacctgtgccagtgtcagctgaggctggcttgggggctgatccagaggccaacaccaggccctccatcactatcacccagagcctcctacctcaccttcagggctcaaaatgctttccagccacggtgcattttccttcttccttttgccttggaaaggaaggcaaagcttctgcagagattcagttgttgttccttgcagtcaaacaggtgcttccctagtgacaagttacaatccagagaaaccaatttccctgacaacgttaatgtcagttaacatgaagccacttctttcctaaaccctttacgttttgtaccaggtccagaccagatcgtttctttaaaggcccaatatttttctcctttcttttctaaacctaagaggttttgagcattatgtaattcttagtgcttcccctaaratgcacccaaagatgtctgagacctgtgaccttctagacctttgacccctggctctactgaatgaaaagtcccctatcttaaacctgaggaccaggaaggtgaaactggcccaagatcatatgccggtcaccactccagtccagttctttgctttagcttatagctcctggcattggagcccctgaaatagtggagtcccacccgggcagcctcagatttccaggagcaattaaatataacagatctctggggtgggactcagtcctcagtgtttaaagctctcctatgatcccagtgagctgctagggttgagacccacgcctccagcggctgcccgggagccgataactcccgggtgggtctccagaccccaggaggctgcaccatgcagggtctcagaccacagtctgcctggactcgaaccycagacccggttcctagctccctgagcttgagcaagttaattattctccctgtgcctgtttccttatccacaagttgaaaatactaatgatacctacctcatagagtgtgaagatcaacagtagctggtacatagtaagtgctcaatatatggtagctagtataaatatgtgaccctttttttgctgtggatgtggtgtcttcggtgattcctcatgactagcccttttcatgagagtttagtaattcctctgccagaaagaaacgtcatataatcagagcaaatcagctcatcaggtgctcctccccctcccccaattctgaaacagaaagatgatggcagcacaactgacatgctgagaggggttttgcattcagatttttaagtggagaaactgaggctagacccaagctaacagttgttaaaggcagattcagaaaaccctcagtcacttaatgcttccaaatgtacctgtttctctgggtctatttgcctgcatgtcccccgactctgcccaccccgagacagtcaaagggggcgacctctcttcctcctgtttgggttcttgtgtctgagggaaattgcaaacgctgcagtaatgttttaatttaagggaaaccagctcttccttttaagatgaaacgtagtaaaattttaaagactttttcaaacagtccctaaatttgttacttaaactaattatggttgccttttataaatgtccaaattaaaaatagacatctaaacgagaatgcaggacacagcccagagcccggagccatgttcacggtttcctagaatcagccctcctctgacctaatttatacttttgagagatcaaagcgagatgaagggagttggaggctggggctgggggtggatctaggagtctgtcggcagcagatggcgaacctgggttctgtgttttgtaattaagtatagctgtgaattggtgaaagacattagattacagtcatttccaaatagtataaagctgtggttctcaaagtttggttcctagtccagcggcatcagcatctcctggtgttataggggtcgaattgtgtccctcccaaattcatacgttgaattctcaacacccaggacttccagaggtgactgtatttggagaaaggactgttaaatgggggattgagggaaaatgaggacttttgagtggggccctgatccagtctgactggtgtccttattagaggcagagacacctggagcgcatgcccggtgggggctggaggggggaggggggagattaagaggaagagacacctggggagtggagtcgggggagagatggccgtgtgagaaggcagcaagcaaggcacatctacaggccaaagagagaagcctcagggaacaccagccccacccggcaccttagtctttaaatcccagcctccagaactgtgaaaaaataaatctctgtcgtttaagccacctggtctgtggtatttattatggcggcccaaacactttgggggcttgctagaaatgcaggttctcaggcctgtcagacctgctgagtcagaaattctgggaggagaacccagcaagctgtgttctcacaagccctccaggtaataacgttcatgtaggctcaagtttgagaaccactggcatgaagtatgattagtactcaggggtagccagcccaggagagaatgacgcatggttggagtagggactggtcggctaaatataaactttcttttagtaggctctgcagcctctggaagagtcccaacgggttccttaaatgggatgtggtatgtgtgaaagtgttccatacatgaggaagctttctgttgaccttaggtggaagtgaatcgtggcattattcagtcagctgaagaaagcaaccctccaaataccccaacacaggcaaactgaatccaagaatctccctcctgcactgaattttccgagtcctttgaaatcttgtgcatgttcctctccaaacaactggaatgtttctcttttctgataactagagcaagaagatttaatcatatttccccttttgtccttgctgctaggaagcccacarccaattgagattctaaatcccagccctcatagaatattttttttctatttttatttcatactgcacatatgtcctttgttatggtctcttcaaaaccttttgagaaagcaaacaagaagaggggagagaaagggaatgtaagaagaaagacattgatctcacagctcagataattgtcagatcaacaagtcctttctttgtaaaattgatcaaacttggttggaaaatttgggcattctcttttactatgagggaacgggtttttcttcattaatgagtgagtcttcttcactctcttgtcttcctgatgtccccagagctgttggtcccatcagtagttccggaactgtgctcagggaacgtgttagttgctgaggggttatgacagttacaaaagctcttctgagccctggtggagccaggctgtcatcagaaatctctcctgccccattttgacatggtggcaaagaattcctctcttccgtctggcctgtccagggctgtccttactccaggtttcataaaccaaggttcaagaagtccacagatagaacccccaggagtctagagttccatagaagaactttattgattgagtgtttttattttggtgataatcttttgaaaaatgattatccatttctggatcatcaggtctgccccggataacctagttctgccatatgaagtcgtggtgcctgtgttcattgatgttcttggtggttccgtgtagctccatttttattgtcttgggctaattggaaatgagcagaaaaggaaaatatatacatgatgagcttttaccaagtaaaggtcaaatgagattccagcgtgccgagtttcacagtaactaggaatgaggaagtggtaaggaaaccgagtcctcatgcagcacagaaagggaagctctactccaaacaccctgacccacagcagtgagcaagcatctgcgtggtttcaggcagggctttagttccagtaaaacatcacccctcatgttaatgttgtgcatttgaatgtttatgtttgttttgaacttgtagttgtgyacctggttttatatttctgcacttttttttttttttttttttttttttttgttgagactgagtctcgctctgtcacccaggccggagtgcaatggtgcaatcttggctcactgcaacctctgcctcccgggttcaagtgattttcccctgcctcagcctccccagtagctgggagtacaggtgtctgccaccatgcccggctaatttttgcatttttagtagagacagggtttcaccatgttggccaggctggtctcgaactcctgacctcaggtgatccactcgcctcagcctccctaaatgttgggattacagatgtgagccaccgtgcctggcttgtgcacattttagyaccattttatttttaataatttaaatcaacactagtctgaaaatatttttattttttgagacaaggtgcttactgtcacctgaaattattttaaaattaaaaaattataaaaaccaattaaaatgtatttttaaaaacattaatagtagaggcccaggtgaatttctstcttggatttgagaagcattctcttgacccctaccccagagtcttcctgaggggaaactgtgtgtgccttgttgtggcaggtgcaccatttgccccttaaactgctgtggagaagaaggaaatggaggggaaagaaacctcaaataccaggtttaaaagccccactgagttattttccgcctctgcaactgaatgtaaaatgatatgctggtgtcatttccatttttcctgcctttgtggtcctgaatgcagtattaactggcatgctamctccctggggattcaggtggccagaaaattgtctccagctcaaaagaggttgggagggtgatgagggggagatccccttatttctctgctcatcttagtaacttattgccttcagaattgtccttagtgattcaaatggcagaattgatgggccctgtttccttcctagtcctttcatttcctttaaacacaggtttkgttttgtttaatggcattgttcaatagcccaagaggcccatgaatgcttctcttagggtgatgaatacatcggctaagaagtcatgaattgcaaaggtcagagttttcctattcaaaataattattaattgaatccagtgacctagggctgacctgcaacaaaattacagagctggtgaaatttgtctttgagattcctatccaggcgttctttttcagatttcttttttcttctttgataaaagaatgcctacgtattaactacctrttttgtgccataccttgtccaaatcctgtactagagttgatcttatttactgaatgctgaaatgtaccttatttgctgtagtcaccacccctgcggggtaggtggtactatccccattttgcaaatagaggaactgagactcagaagggtaaggctcttgcccaggatcaagcccagaccttcttatttcaaatcttatcttcactgtactttacaagtaccctaatacactgtccttattctyctatataaaatagcctcttatatgatgttatcttctctttaaacttatagtttagtaccaacttgctcaaagttatcacttgaatgattgacctcctcttttaggttcctgaggccatcataacaaattaccacaaactgagtggcttaaaactaaggaaatgtattctctcacagtcctggaagccagaagtctgaaatcaagctgttggcagggcatgctctctctgaaggctccagaggaatggatccttccttgcctcttcccagctgctggtggtggccggcagtccttggcatttyttggcctggagacacatcattgcagtctccgactctgtcctcacgtggcattctccctgcgtgtctctgtgtctctgctttctcttcttataaggacaccacccattgggtcagggcccaccctaatccagtatcatctcatcttaactaattacacctgcaaaaaccctatttccatatcaaatcacattctgaggttctgggtggacatgaatttgggagggacattatttgtcacagtacagctctatgaaagaactttatgataatcaacaaacaattgggaaatttatttacwtatttatttatttatttatttatttatttatgtatttttgagacagagtctcactctgtcgcccaggctggagtgcagtgccgcgatcgcggctcattgcaacctccgcctcctgagttctagcaattctcctgcctcagcctcccgagtagctgggatcacaggcacccgccaccacgcccagctaattttttgtatttttagtacaaatggggtttcgccatgttggccagggtggtctcacactcctgacctcaagtaattagcccgctgctgcctcccaaagtgctgggattacaggcctgagccaccacgcctggcctagaaatttctttaactagaggggtcttcctgcttacagatcaagtatccctacagagattattaagccattcattcattcattcactcaaccaacacttatggagcatctcctatggggctggcacttttgcaagcaccggggatatcgctatggaaagacaaagttcctgctctgtggtacctctatttgataaggcagacacttcatgccagaatggtgtgacaagcatagatctgagtcacacactctggctcaagtcacagttctgcttctcttagaaggaggcaccttgggcagtcactttgcctgtctcagcctgtttcctcgttgacagaaggcaatgccgagaccaccacagctttacaaatgttgggagaatctcctcaaggtagtgaacaaggagtgctccacaaatcgttttccacgttctcattcatgtgttggtgcgtctgacggatcctcagctgtaaaatggagatcctaataatctccgttattactgattgcattaaagaagttagtcagtgtgaagcatgaagagcattacctggctcacaacgagcactcacccagtcagtgttaggtgtcatcatcatcctgatatatactgtgcaggagggaaaattagraaattctgcagcttgcttttgatatttcttggcatatgcctagtgtcacttatacttggagaactaaaaaatagcatcactggagatttggattgatggggacccatgaccactgggcattgagcctttgtggcaaaatctcagcaagacaaaacaatacccaggcactaaggaagaatattctggaagattctctgtgggacccagaaaagaatacatggccaccagttggctaccctggaagaaactgggctctacccaacattaaaggtggccaagaccccggcagtcagctaatctaactgcctctttctacaggcaaggcaggggcagcctagagagggaggaaaggaagaaataatactgattgcgtatctactgtgttcaggccacggagtacacaccttatagtcctcacaccagcctaacaaggcatcggagtgaggatctcctttgcataggcaaggaaacaaaggccaagaaaggcccaggccccatatttgggtcataataacatgcaaactggatccgtggttcagtagcccaggcctctttgcacatatagattattgctctgccctttatagtggggataaatttgktgagtggtggcatttggtctgtgaataaccagaggtcggtaatttgccagttatttccaagctgggaaactccaggccaagctggttttaccaagtggaacccgaaaatatatatatggtgcccttgcttctctggaatctggctgagggtcycagcatcgtatcccggctaggaccctcagctctcctgtttttcagctctcctgttgcagttatttattgctgggcaacaaatcaccccaaaacttagtggcttaacacagcactgatatgtcacctgccacagctctgtgggtaggtaatcgggcaggtctgctggtctcacctgggatcattcacatcactgtggtccgtggatggctggcagttggtgctggtctgcagtgccccagtcttcatcctccaggagrctggacaggtctttccatagcatgactgtctcagggcagcgttccaacagcgtgaaggctaggaactgcagggcttcctaataggcttcagaacgtgttcatcgttgcttctacctcattctactcatcagagcaagtcacagccagcccccattcaaagaactggagaaatagagtctctgcttcttgatgggaggagtgtcagtgtcagactgcaaaggggaatgcacatcgggggatactagcaactctttccagatttccaccagttatttgtgaggctaaagcagtgagagaatcaccatactcttcacacatagaccttgcaaagtgttggtactctgtcttggtttgcttcctcccttgggtataaaaatttttagtggcgatggcatgttatagttcagcgtgttgctgggaagattaaacataatgtatttaaatcacctgtgaaggtgcctcctacagagtagctccttagtcatactgtctgctgttgtcatggtgaccatcaccatcctttgtcctggggaccatgagaggagatggacatggagcttaatgcagggtgcaatggcttctccctggtggctaccatgatgcccctcagttccccagcaaactcatcagtggccctactttaggcccatcccaatggccctgtgcaccttttagtaaaaattgtgcagattgaggttcaaagttggaggagcaggggcagatacttgggttgcactcaagtcctaggctctactgacttggctgtccaggtgactggaggatttcacggatacagctgcattctcaggactcaaagccacccacagtctggcctggaggaggcggtgactctggggctccgagtccctgtgaagygagtggccacaggagttgagaaaaccaagaatgaactagacaggagggttgtgctatgaagcacactcagtgttgtgggtgttcagtggagggaatggttattccacttgtgtggcaggggagtgtgtggggccatgaagaattgtcaagtttggggccaggcacagtggctcacccctgcagtctcagcactttgggagactgaggctggccaatcacctgaggtcaggagtttgagaccagcctgaccaacgtagtgaaaccccgtctctactaaaaatacaaaaatcagcagggcatggtgatgcgtgcctgtaatcccagctactcggggggctgaggcaggagaattgcttgaactctggaggcggaggttgcagtgagctgagatcgcgccactgcattccagcctgggcaacagagtaagactctggaaaaaaaaagaaaagaaaagaattgtcaagtttataccagcagagattgagaggggagaatcccagatgggcccagcctaaggaacgcttgcggcaaagaggaaagagtgaatcattggtttctcgggacccccccctccggttatgaaagggtgaggagtaggaatcaggctggaaaagtaggttggcattgggctawggagaaccccaaaaggccagtgtatgaatgggggcttggttcctggggcaaggaggcaaccaagacaccacctcatctgtagctccagagcaactattccatagccctgtgcccccagtttctctgtaactttaatcacaattaatattattccatttatataaaagaaggaccatactgaactttcatgagtggtggtggaggtaaggcaggaatccgacagtagggtgccaccactccgtgaaggtctctgagcctctgggtgctggagacgcaggtggtggcagagcaggcagagtgccctcctgtttcctgttctrggtagactgtgagtactggtttggactgggagtgaatggcctttggggagaaacttttgctcttagaattcagaggaacacacacatcttcccaagcatttccctttgccctctaytgaggctgacagctctctgccctggcacctcctagactatgagtgatttaggttatgtctctttgcagtgctgagcagagcactttatacatcatgaggtctggatccatgtggggtgtgtgtgtgtgtgtgtgtgtgtgtgtgtttagagacagggtcttgctctgtcacccaagctagagcacagtggcacagtcatacctcaaggtaaccttgaactctggggcttaagtgattctcctgcttcagcctcccaagtagctgggatgtcaggtgtgcgccaccatgccttcctaattttttagtttttttagagatgaggtctcactatgttgccaaggctggtcttgaacttgtggcctcaagcgatcctcctgcctcagcttcccagagtgctgggattaaaggcatgagccactgcacccagcttagatatgtgtttgaacgggtggatttatgatctacttgtagccaagtggaaatgtttcaggcaagtactgagttcttattcgtcttgtgtctcctctgcagctggagctctcaaacactgctgtcctgcaccagatgcggcgggaccaggtgacagacacgtgccgagccaacagcgccacaagccgtaagcggagggtgctgacccccaacgacctgaagcacttggtggtggatgaggaccacgagctcatctactgctacgtgcccaaggtggcctgcaccaactggaagcggctcatgatggtcctgaccgggcgggggaagtacagcgaccccatggagatcccggccaacgaggcacacgtctccgccaacctgaagaccctgaaccagtacagcatcccagaaatcaaccaccgcttgaaaagctacatgaagttcctgtttgtccgggagcccttcgagaggctagtgtccgcctaccgcaacaagttcacccagaagtacaacatctccttccacaagcggtacggcaccaagatcatcaaacgccagcggaagaacgccacccaggaggccctgcgcaaaggggacgatgtcaaattcgaggagtttgtggcctatctcatcgacccacacacccagcgggaggagcctttcaacgaacactggcaaaccgtctactcactctgccatccctgccacatccactatgacctcgtgggcaagtacgagacactggaagaggattctaattacgtcctgcagctggcaggagtgggcagctacctgaagttccccacctatgcaaagtctacgagaactactgatgaaatgaccacagaattcttccagaacatcagctcagagcaccaaacgcagctgtacgaagtctacaaactcgattttttaatgttcaattactcagtgccaagctacctgaaattggaataaagggggtggggagagggagagaatcatgctttttaatttaagatttttatttgtcaaaagaattatatggatattgggttattttgtaaattaatatttctttggggatgatgctgcgagcagcatagtgagaattatttaaaatccttcgtagggaaggacagctgtctttgcaggggaaataggatgggtcgtccttgtctgtagaagtgaatactgcaacactgtctcaaaggtttcttgtgttctggtgaattccatgaattgtgcattccataaattctaattaatattatttatagttatttaaacatggtctcattatttctttttgtggcagcaaaattctaacatctttccagaagaaatctatgattcctgctttgcttgctacagctcatttgggggcatgaatgttctccttactaacctctcatggagtcatgtgataacagccattgtcatgtgtatggatgccaccattcttgaatttctgctagaaataagtaggttgctattgcacttagagtcatctttgcaagggactcattccaaaccaattccaatcgacctgaaagtcccttgcactaaagaaatgtgatttttttttaacccaaggagaaagttggttgtaacaatttttcaccagaattagcaatctgatagaataggcttttttaacaggaattttaaactggcggtgccagttgcagtgaaggtgaagtggctattgctttatattcgacaaatatttattgagcatctactatatactaggccctgaagatagagcgttgaacaaacccaatrgtcttggccctcaaaaagctttatgtgacatagagcatccagctcgacaattagcaaacccctgatattattcatggacttgacatgaggtttggactattcatgagcaacagcagaaggtccatgacccctacaaatttacatttttctatggcccatatttgaaaacctcacattcggagcaggccactttatattcgtgagtgatcccaagctcactgaccaacagaaaagatgctaaaaaaatgtgtcctatcatgtgcctgctccaactgatgggtaatgtctgcctttaagccccagaatggattctccaggcacagtgtggaagagtgctgtggttgattagcaatgtctgccttgggtgaggaaaggggaacactcctcaagtgcctcctactgtcatctccattcagcctagcaccacatccccatgtagaagtgttgtcttctactgcttgccacgtacaagtgtgaaatgccaaggtgagactcgtacacttggggatttgcaatggtttttacccctcatgaaggtcagaggtggactatttgtacacatacacacatgcacaccctctcacgtcctccagaggctgaaagactatcagcatcttggtaactgccatgcatgagcagcaaggacagccttccataatccatgccccatttcctctggaagcctggaaacttttcatttcctgttccttgctaattaacatctaaacatgcttctcatttccagccattgctgatgcttctcagttgaagtttgagccacatccctcttacagctagtgaatgagttggtagcagmtactgtatataataataataatagttttaataataggggagggtgggatggggtgtgggtaagttttgccttttgttttgtttttgatgccgtatatagtgaaggggtgaggatattctaaacaaacaaaaattgaataatttattcacagaaactattaagattgtattgtaaagctcacagcaagctcagtgggcagcagctgcaacatctcaccggggaaattattttatttaacgtgagtgagatgtgggccggagaaggtagctgaagctatttataaaacgttgtgtaccttcttccgagctctctcccctttgtgaagggcgcagcaactatacccttgatggatggagatttaygcaatgtgttttactgggtagagtgacagaccttggctgtccctggaattgagaatctggaccttatttccaggcagagaacactgtcctcagaaatgggacttctgataatgaaacaggttgtccaacattttctaatacgcattctacagaacacaggttccaggaggcatcaggttggtgtgatgcagactaagggttttgtggtcaaatatccttaagaaacaaagttaagtcagtttcctttctgcaaggacttttcagccttcaatgtgtgctgtgcatggtgaatccccaaaaataatccttgagtctgtagcatttcctgaacttacatgaccaggatactctattttgcagatcaccccacagagctagggttccaccgagtatactttgcttaggttgacttagcatatctgaggtcttcaaggataaaaactgccaccccaacacccttccattaaaaaaaaaatacaaaatagcaccacagtctccatctggtttatagcaacagaggtactttatttaatgaagcaatggttctaatcctggatactgccacggactacaattctatccctcccagagggagtggaggaagtcttgggtggtgtggacagaaggaagagaggagagggtgagtggggtatagggcccagggtggctccctactcctcaggctcaaaaggatgctcagtgggaacagatgatctcttgatgagtgcttcttcagtttcatagtttggaatcgttcactgtgtgctttttggggggttttcaatggaaattcacgttgctttgcatttctgtgtccgtctttggtcagttgtgcaagcctgctcactgtcatgtgaagatggcctttcatctggcttctctctcttaagtgagaaagattgtccttcaggggacatgacatcaataggtttctggaatgagggactctttctccccgtgttttgctttgtgttcacattttcttttctaatggcattgaaactttaaaaaaaatggattcaactgtttttgcagaatgtagaaagtattctgtgtccttggttaaagaaatccacttgtgaagtgtgcctggaaaatgaaagtttgtgttttttaaagaggaatatttgaaactgctttctatgcatgcttagctggagaaaagtacaggcaggcgtcccatctcccagccacttctcaaaggtgctgctgtgttttaaagaccaggtacagccagggcagtatttgcaaggacattcctgcttactttatccctttggttggaaagctctagatgattcccgcagctcctccagaccccgcctccctgccctccccagctggtctgggaagaggtggtctgctgacctgtggtatctcagaggggacgttcctcctcctccctgtgcaccaggtgggctgcaccctcctgcctattcaggatgtggatgccacaggagagcagcaggcagtggaaacttcagttgcactggttctcctggtggcaaaggcatgaagcacaggggtcgattaatccaggctactagaaagctccagagcaaagtgtgcgggtcccacaaatgcttggctggtggggtctggatcagtgctgagatagagttggcagaagaagcagaggcactctgcttgctttcctagccagtcctcccctacacacacacacacacacacacacacacacaatctcagctgcgccattctgtgcaatcccagtgaccaaatcccttccttgcccacctctatgtcagcaggactgaccacatcactcccccgagttcccaccaccagcatttcctccaacctttttccatcacaaccagttagaaccctacaggcaacaaggccttctagaatccgcttaacccttggctgataacaggcaaatttcagtctgctacactttgttaggtccagaaggagctgcccatactactttcttatgagcatgctcagtatggcatatggacatgtaatgtcacatctttgtggagtgtgattttyttttttyacatatttgtatgcagtagagrgcctgttgtagaaaacgctccctgtatcttgctgtactgttaaagaaagctgaattccacattgccaacaaaagcgtgaaaatgttcatgaaccttcctccaggaaaagccattcaagcctgattatttttctaagtaacttcaattaaattgaagaaaaaagaagctgctttctgtgtatggtttgctcatggctcattaacaaaagactgtaggggtggggtgggccgtggaccttagcatgcggggggccctgctcatgtgtatcaaaggatggagatgcaggcttcgttggaagactcagccctggtaaaaaccgccatagatccaaattctttctgttcatcgggtgaatggaagcttttcttctttccattttttctataaagtctttgtagactaatgcattagaaggtgcactgtgatcacacagttccaccactcgtgtgaaaaggcatgaaggctgtcagtaaatggctttggtggcagagccagtattcaagcccaggttgatgtgccttcagaactccatgtttttggcactgaatgacatgcctctctaaatggccatccatggtgccactgctaggaagttgcaagcctgcacttcaagtcccagtttttcaattccaaatccaatcctgttctgattccccacatagcttatttcggctctatggatgagcatcttttagcttttttttttttttttttttggaaacggagtcacactctgttgccaggcgggagtgcagtggtgagatctcggctcactgcaacctccacctcctgggttcaagtgattctcctccctcagccccagagtagctgggactacaggtgtgcaccaccacacccagctaatttttgtatttttagtaaagatggggtttcaccatgttggccaggatggtctcgatccctcgaccttgttatccacccgccccagcctcccaaagtgctgggattacaggcatgagccaccgtgcctggctgcatcttttagctttattggtaaaaatgatttctgtatatttttccaaagaagaaattatactcaatgttgtttctgtttttcattgtattctaatttaattttcttttaagagacaaggtctcactctgtcacccaggctggagtgcagtggcacgatcgtaactcactgcagccttgacctgggtgcaagcgatctcccggcacagcctccaaaatacccaaggattataggcgtgtgccaccatgcccggctaaccaatttctttaaacataacatctaaacatttttaacattacaatattgggtgagaaaatagatcccgttttcaaccatgctagatatggtttctaatcaccagctggctttccccactggtagctggtgcccacccatgggcatgatatccaaaaagaccaggaaccattggctaagaatacatttggccaagaatacattgctagtgtcatcactgtccttgctatggtcccatctggttgggaaatgcccagaccacagagcttagtcatcttagattcatagaaaacatacatcctttttcatcagtgaatggatgtgactttgcgatagcctgtctctgtctcatttggaacattgtaaatgtcagtgggaagcaaagctagacgaggtcatctctagcctgtttgctccccttggagtgacactgacatgctttcttgccagctaatcgggaggtgtttctgatggtgccccaggtgccctatgtctgacctgcagaagctgcagaacctgaggagcctgtggcccagaacattgcctgggccaggtcagggtaaggtaattattgatcccccaagtggacaaaaataggatgaggcagaatcagtagtgtaagatgtaaagtactctttctcgggaagagctcccttttctcaagttacgtctttcctacatttttggtattagaatatctttttttgtttccttttttttgtttgtttgggtttttttttttttttttttttttgaaacggagtcccgctctgtcgtcctgtcatcaggctggagtgcagtggcatgatcttggctcactgcaacctccacctcccaggttcaagcgatcctcctgcctcagcctcccaagtagctgggactacaggcacccgccaccatacccagctaatttttgtatttttagtagagacagggtttcaccatgttggccaggatggtctcgatctcttgaccttgtgatccgcctgcctcggcctcccaaagtgctgggattacag

SEQ ID NO: 94632 - DNA, 141121 bp, Homo sapiens
  misc_feature (1)...(141121): n = A,T,C or G
gctaatttttatattttttgtggagacggggtttcgccatgttgcccaggcaggttgtaaactcctgagctcaagagatctgcccaccttggcctctgaaagtgctggggttacaggcatgagccaccgtgcctggccttgatgctgcacttttctaagcaataattcaagtattttttaactggggtagagggatgcccaccctatcaattttatgcacctgctgtttcttatatctcacaatttcaaatgcacacatttaaaatttgcctaagattggtcgcatttgtatgagttgttctcttcagccctttctttcaaaactgtcatggagatacttggctcattctcttggtgttcctgaatgcagtttcagaaatgaaaactttaaaaatcaaaattccagcttggttcaagacattggttggtgctcaatgtgtgtgcatatatatatatatctatatatatatatttttttcattttttcagcacacaggtttttttttttcatttgttttgttttgtttttttgagacaggatctcacttggttgcccaggctggagtgcattggtgccatcatggctcactgtagtcttgatgtcccaggctcaagtgagcctcccgccttggcctcccaaagtgttgggattacagacgtagccattgcccccagcttacacacagtttttgagctcttactctgtgccaagcaccaagctgggtacaaggatccaaaatgaatgacacttggtctatgtccccaagsaccacccagtcggtcagggagaacagacaaccgaacaagccacttccatgccatgttttctgtgtcatcatgatggaagtctgtacccaggcctcccaggccaggatggactgggcaaagagccccaagggagtggactgccgaatttctaaagcatttggccactgtggccagcagagggcatgagagggagtggccattcagcaggggtcaggtttagagggccccgtatgccctcctttcctggggaggatgtaggatttaatctgttgggcctctggggaagccgggatagcttttgcaacatttttggcaatgttctctggctgttgttaatttcaaaatttttcctgagggcatgtgtgagccagctgtttcaggactcggacctttcttgcagacaattttaaagattttcttgagaatttactatgcacaagagaaatagtaatagtatgaaatagactttgtccccagaggttcctagctcaccattcagaggcaaaaggagacgggaaggcaaggactaggcagaggagttgagaccagagattcacaaccaaagggcagttttgcctcccatgggacatttgtcaatgtctggagatgttttggttgtcccagctgatggaggtagatgctactggcatcaaacaggcagaggtcaagggtgttgctctacatactataatgcacaggacagcccccaccacaaagaattttccaaccctaaatatcagtagtgccatggttgagaaatcctggggtaagaacaaggcttgggcatcagaaagatacccatagtactgctatgtatttgtttgagtcgttgttttcaattcttttgggatatacctaggagtgagattgctggatcatatgataattctatgttcaactttttaaggaaccaccagacttttttccacaacggctacaacattttaaattcctactggcaatggttaagagttccaatttctgtacctcttcaccaacacttgttattctctctctctctcttttgggttatagccatcccagtgcatgtgaagtggtatctcactgtgattatatgatttgcattttcctgacacctaagcatgttgaatatcttttcatctatttattgaccatttgtatatcttcattggagcaatgtctatccaagtcttttgtccacttaaaaattgggttgtctttttgttgttgagttttaggagttctttatacattctgggcactagactcttattagatatatggtttgcaagtggtcctcccattctgtaggttatcttttcactttcttgatagcatcctatgattcacgaaagcttttaatcttgatgaagtccaatttacctattttttcttatggtaaattggacttcatcaagaagcatccaatgcttgtggtgtcatatctaagaatcaattgacaaatccaaggtcatgatgaattacttctatgttttcttctaagaggtttgtggttttagcttttatatttaggtctttgatccattttgagttaatgattgtatgtggtatgaagtaggggtccaactttttattcttgtgcatgtggaaatccagttgttccagcaccatgtggtgttaaagaggtaatacttttttttttttttttttgagacggagtcttgctctgtcgcccaggctggagtgcagtggtgcgatctcggctcactgcaagctctgcctcccgggttcacgccattctccttcctcagtctcccaagtagctgggactacaggtgcctgccaccatgcctggctaaatttttttgtatttttagtagagatggggtttcaccatgttagccaggatagtcttgatctcctgacctcgtgatccacctgcttcagcctcccaaagtgctgggattacaggcatgagccaccatgcctggcctgaagagatcattctttctccattggatggtcttgatatccatgtcaaaaatagattgaccatagatgtataggtttctattccattgatctatatgtctatcttatgccaaataccatgctgttttgtttaccatagctttgtagtaagtttttaaattgggaaatgtgaatcttcaaacatattttttaagattgttttggctgattggggcctcttgaaattccatataaatctgtatattcctttggataatatggacatcttaacaataagtcttccaatccatgagcaaggtatgtctttccatttatttaattcttctttaatttcttttagtaatgttttgtagttttcagtgtgcaggtctttcacttctttggttaaatttattcctaggtaggaaacaagtgtgataggcaataatagaaaaaggaaacattgaaattaaacatatttatttctaggtgttttattcttttgaatgctattataaatggaattgttttcttaatttctttttcagattatttaccactggtgtatagaaacacaactatttttgtgtatttatcttgtatcctgcaactttgcttaattatttttattacctctacaataccaaggttttctgtgtgtgtattatctggcactttctacatataggaccatgtaatctgtgaataggggtggctttacttcttccttcctaatctctatgtcttttatttcattttattgtctaattggtttgtctagaacttccagtacagtgttgaatagcactggtgaaagtgggcatccttgtcttattcctggttaaagctatcagcctttccccatttagtatgatgttagctgtggatttttcataaatgtactttattaagttgcagttcccttctgttcctaattttctgaatgttgttatcatgaaagggtgttggattttgtcaaatgcttttcctgcatcaattgggatgatcatgtggtttttttccctttgttccattaatgtggcatgttacattgacattgagycacccttgactgacttttctttaaaaaaaacacatgatgatcttgaaaggaaaaaacccctctgaccctgtgtactacctagaaaatagccttggcaacatatcagcaaattctgctgctgaaagtgtgtaagaagtacttggattgtttagttctgggaaatattgagaacttttccacttcctttaaaaacattgtgttgaaatttaaaaagaaaaagctttatggcagggcgcagtgtctcacgcctgtaatcctagcactttgggaggcagaggtgggcggatcacttgaggtcaggagttagacaccagcctagccaacatggtgaaaccccatctttacaaaaaatacaaaaattagccgggcatggtggggggcacctgtaatcccagctactagggaggctgaggctcaagaatctcttgaacccaggaggcagaggttgcagtgagctgagattacgccactatgctcccacctgggcgacagggtcagattctgactcaaaaaaaaaaaaaggatttttagataccaaattgacctgctgagctttgtggtccacttttgtaatgcttctagtatataattgtggcaaaattggttcagaaatttcaacacatagagagaggtcccatttaaaaattttttttgaaatagggtctcactctgttgtccaggctggagtgcagtggtgccatcttagctcatttcaacctctgcctcctgggcttttcttttctttttctttttttttttgtttttgagaccaagtctcactctgttgcccgggctggaatgcagttgcatgatctcagctcactgcaacctccacctccaggttcaagtgattctcatgcctcagactcccgagtagctggaattacaggcacccacctccatgcccagctaatttttgtatttttatttttagtacagacagggcttcaccatgttggccaggctggtctcaaactcccaacctcaggtgatctgcccgcctcagcctcccaaagtgctgggattacaggcatgagccaccgcactgggctcatttttaaaacaagatttccttcaaataacaatgatctactcattagtagggcagagttagggtgatagaaagaggtgtggcttagagattggaatacctgggttcattctttcaatacacacttgtaagccctcattgcataccaggcactggtctagaccctgcaacagaaaacagtctcccgaggcttgttgggcttctatgctagttgtaagcataccccacactggggatgatggcgcccttcctccctccagggccatgatggtgactgactatatgataataatactagaatgatgatgatgatgacagaagcaacaattccctttcatttataaagtggaatataattaagagtctttaaaaaaaaaaaataacagctttggctgggcgcggtgggtcacgtctgtaatcctagcactttgggaagccaaggtcaggagttagagagcaacctggtcaacatggtgaaattctgtctccacaaaaatacaaaaattagctaggcatggtggtgcatgcctgtagcccaagctactcaggaggctgaggcagaattgcttgaacccaggaggcggagtttgcagtgagcagagattgcggcactgcactccagcctgggcaacaaagggagactgcatctcaaaacaaaaaaacaaaaaaaccccagctttattgagagataattcacatggcatacaatccactcatgtaaaggacaagtcaatgttttttaactgtattcacagagctgtacaaccatcacctcaatctgctttagaacattttcatcatcccaaacagaaaccctacactctgtagccatcatccccatcccactaggtcctggcaaccactaatctgttttctgtctctcaagattggcctgttctgcacacttcatatacttggaatcgtataatatgtgaccttttgtgattggcttctttaacttagcagttttcaaggttcttccttgaaccttggcaggaaactaagatccagaggggtgaaggaatatgtccaagcctgtttcaggcagagcagggaggagaaccccatctctcccctcgtccagtatttcaggaatacacagcaccccaacagcctcctgccccactagcttctttaggagagaaatcacttgattatgtaaatcctaaaatgtctctccttttctccttacagattttctgaatggtcttgcttctttgtytatcttgtctgattttctcctgtctgaccttttcctggttaaaaatctgggggaaaatgacggactccaagccgatcaccaagagtaaatcagaagcaaacctcatcccgagccaggagccctttccagcctctgataactcaggggagacaccgcagagaaatggggagggccacactctgcccaagacacccagccaggccgagccagcctcccacaaaggccccaaagatgcyggtcggcggagaaactccctaccaccctcccaccagaagcccccaagaaaccccctttcttccagtgacgcagcaccctccccagagcttcaagccaacgggactgggacacaaggtctggaggccacagataccaatggcctgtcctcctcagccaggccccagggccagcaagctggctccccctccaaagaagacaagaagcaggcaaacatcaagaggcagctgatgaccaacttcatcctgggctcttttgatgactactcctcygacgaggactctgttgctggctcatctcgtgagtctacccggaagggcagccgggccagcttgggggccctgtccctggaggcttatctgaccacaggtgaagctgagacccgcgtccccactatgaggtaatgtgcattttctccttgtaactgaggagtgcagagttcaggtggggtccacacccttcccaacctgtgcccaccttgatcaagcygtttgctgatgccaaagcttcaagggtggctatgcacaaaaggagaagacacgagccttctcagaagtttccttccttccttctttccttctttccttccttccttccatccttccttccttctttccttccttccttccttccttccttccttccttccttccttccttccttccttccttccttccttccttccttccttccctcctttcaaaatcattccttgaggctgggcacagtggctcatgcctgtaatcccagcactttgggaggccaaggcaggcagatcacttgaggtcgggagtttaagactagcctggccaacatggtgaaactccgtttctactaaaaatacaaaaattcaccaggcatgcaggcgtgtgcctgtaatcccagctgcttggaaggctgaggcgggagaatctcttgaacccaggaagtggaggttgcagtgagctgagatcacgtcactgcactccagcctgggtgacagggcgagaccttgtctcaaaaaaggaaaaaaggaaagaaatcattccttgtgcatctactgcatgcacagggctcgatgccatgaaactgactttctagaagrcctcagcctagttggggaagatgaccttgtgtttagttataatttaagctgaatgagccaaggctggcaagagccacaagtgatgatggtagtctagagggaggggcagttctctctgcctcctgaagagacattgattcattcattctttttttttttttttttttttttttttttgagacagggtcttactctgtcactctgttagctgagtgtactggtaggatcatagctcactacaacctcaaactcccgggctcaagcaatcctcccacctcagtgcactcctgggtagctgggactacaggtgtgcaccaccacacctagctaatttttaaattttttatagaaatgggaatctcaccatattgcccaggctggtctccaactcctggactcaagcgatcctcggtctcccaaagtgctgggattacaggcatgagccaccacacccagcccattcattcattcattcattcagcaggtaactgacaactgaaaaaccagccttcccccagtgatgcctgaaaagcagaaactcaaacactctaaaggtctccatcaatttgattgttggaaatgaatgcctgtaggttcataacaggtgggactatcccagcggctgcagtcagtggctttgttgttgatgttgttgttatccaccttctcctctgccatccccaaattacaaatggaatacagcacttccaggtagaaaatttgggaaatataggagaacagagagaagaaaagagccaccaaccaaaacttcaccagccagagggaaacctctgttctcattgttctacttcttccttctagtgtgtttttctcctctggagtgaagttttactggctaktcttttaagcatctcctgtactctctcccaaattagaaaaatctagaggtggtcttccatacatgtccatgttagcagtgagcttggttttaaccctggtagctggaagtagaagacagagaaaaaggaggaggaaagtattccatatactgaaacttttcaggggaagagtgtttgagtttctagaagggttaagggaagagaaagtctcagaatctagtacaaagagcacagtctgtggagtcagctggagtggggttcagtctttggctctgccaccccctactgtgtgaccttgggcatgacccttcacctctccaggccccagtacctctgtaaaatgtggaagggattaaatgggataatgtaggcaggcatggtggctcacacctgtaattccagcactttgggaggatgaggcaggaggatcgcttgaggccaggagttcaagaccagcctgggcaatatagtragacctcatctctaaaaaaaaaattaagaatttgccagacattgtggtgcatacctatagttctagctacttgagaggctgaagcaggagggtcacttgagcccagaagtttgtggttatagtgagctataattgtgccactgcactccagcctgggcaacagagcaagactctgtctcaaaataaaaaaacaaaaaagaatgtatcaaaccaacaaacttataacatgattattattattactatttcctgagtcttggatgccaaaatagtcgtgaagattaaatgaactaatatttctcaggtacttggcaagagaataaagcatccrtatttggtagataataaatagaaaggggggcaagtctcccacctttccacccactgtcttcctgccaccattttgaggggtctttactggtttgagcttaaaccaaggtttttctgagctggtacatttataaaggygaaaactatctctctctttctctttctttcttctttttttatttttttggacagagtctcactctgtcacccaggctggagtgcagtggcatgatcttggctcacagcaacctctgcctcccgggttcaagcaattctcctgcttcagcctcccaagtagctggaattatgggcgtgtgccaccacacctggctaatttttgtatttttagtagagacggggtttcaccatgttggccagtctggtcttgaactcctgacctcaagtgatccacccgccttggcctcccaaagtgctggaattacaggcatgagccatcacrtctagcctacttaactatctttcatagggaaaatgaaaccaaaatgttgagtgaatttcctgccctcgtgtcttcatggcatagaaacctaacattgtagatcaatcttttatccttactttgtcccagcaaacagctggcaggagggacagagggatcttggaaaggcagtgaatgtggagctgaatgacattgtaggattgtgggcgattcaaaggctatgatatggtgaacgaaggagtgatgtgctgcatgaacttgggtgagtcccttcccctctctgagtctccaatttmtcatctttrgaatgaggaggctgaggctgggcctgatggctcatacctgtaattccagcactttgggtggccgaggtgggtggattgcttgagctcaggagttcaagaccagcctgggcaacatggcaaaacctcatctctacaaaaaaatataaaaattagccagttgtggtggtatgcacctatagtcccagctactagggaggctgaggtgggagaatcacttaagcccaggaggcagaggttgcagtgagctgagattgccccactgcatcccagcctgggtgacacaggcagaccctgtctcaaaaaaaaaaaaaaaaaaaaaatgaatgaggaggctgcaccagactcctgagatgtgacctgtggccctaaagctcactgacatacagttagttattttgtccccagtatgtgtgcattttcagagttgagaatttagaattttagcacccaggggcaatgcgggtggttctgctggcacctcctgagacactggcacttcctcaaggaacattcccagccccagratcaggggcttctgacagagaagactcatgtgtgcttgttgtttctaatgaactgtagtgagaatcccacatcaaagaatcttcagggagtcaagccttagacatgtgtgctggtgcctgctgcctctggtgtttgactggatgaaaaaattatgtccaaacctggtgttccagcctgttggaaacaacgcatatcaaaatgaggctgaggtccagcatggtgactcacgcgtttggggagactgaggtgggaggatcccttgagcccagaagtttgagagcagcctgggcaacataatgagaccctgtctctacaaaaaataaaaataaaaaataaaatgaggccaggtaaggtggctcacacctgtaatcctagtactttgggaggctgaggtgggtggattgcctgagctcaggagttcaagaccagcctgggcaacatggtgaaaccccatctctattaaactacaaaaaattagccaggcatggtggtgcacgcctgtagtcccagctactcaggaggctgaagtgggagaatcgcctgaactcaggaggtggaggttgcagtgagctgagatcacgccactacactccagcatgggcaacagagtgagactctgtctcaataaataaataaataaataaaatgaggctgagcattttattatcttgtagagcttttggctttggattttggcatctttgggatccktggtagcctggtgtttgctggttacccattgactcttttgcacacatacaggcagggtagtaatacctcttccctggtgttcacaggtcaacacccaagcagttttgggtgtrggccatggaaggtggtgtcaaaagacaaaatcacagcaaatttgatttaaaactcgaattggcttttatttacaattctaggatcatgcagcacctcattctgtaaaatagaatgggtcttccgaagagctgagcagagaggagcttggctttataggcagaacagggctgaagaaagcagaaacaagggacaaaggggagcttcatagtttctttctttttctttttctttctttctttttttttttttttttttttttgagacagagtcttgctctgtcacccaggctggaggctggagtgcaatggcacaatctcggctcactgcaacctctgcctcccgggttcaagtgattcttctgcttcagcctcctgagtatctgggactacaggcacatgccaccatgcctggctaattttttatatttttagtagagatggggtttcaccatattagctaggctggtctccatctcctgacgtcgtgatccacctgtctaggcctcccaaagtgctgggattacaggcgtgagccactgcgcccggcccgcttcatagtttcaaaatgactttcccttcagggttaaaacaaatgcaactttcttatcatgttggctcaggtacactggaccccttctgattggttgctattgttttytggaaaactggtcagtttcaaagttcagactgattgcgaggcagttggccaggagtgatccgtcgttttggtttggtctgtaggggctaagcacaggagctcagctcaaaatcatggcctcccatatattaaaattttgttttaattttttagatttggggggtacaagttcagttttgtcacttggatataattcccagtggtgaagcctgggcttttacgagccattgcttgcatagtgtacattgtatctattaggtaatttgtcattccttaccccttcccaccatgccacctttccaaatctccagtatctattattctactctttaggtccatgtgtacactttatttagctccacttataagtgagaacaagcataaattatatttaagggtggtgcatgcaggccagccagccagttgcctgtaaccagctggagcactgaggaaaggaagcctgacccaaaaaggcaaatacagtgagcaagaatccctgttagctgaatccaggaactccttctgaaaaaaaatattatttttcttgaggccaggcacggcaggtcatgcctgtaatcccagcactttgggaggccgaggggggcggatcacaaggtcaggagtttgagaccagcctggccaacacggcaaaaccccatctctactaaaaaaaaaaaaaaatagaaaaattagctgggcgtggtggcaggtgcctgtaatcccagctcttcaggaggctgagttaggagaatcrcttgaacctgggaggcagaggttgcagtgagccaagaccacgccactgcactccagcctgggcracagagtgagactctgactcgaaaaaaaaattattattattttttcttgataagttgctaaataatctgtatcctctggcaaatcttctaaccgtttgaggtcctgtttctgcaaaatggaagcaggggctagaggtttaagctagtccttccagacaggatccaacccttgccccatttccaagacaaacaactaaggcctgggagaagaggccaggggtatttatttgagggttctgactcacgtggaagccacagtgaagaagtgacttgtatttgtggatctgcttctgctctctgcagtttccttgggcagtcacttcactgctgctctgccctggaaggccacttcctacattcacctcttcctgccaggccagtagctgggagactggcaaggcaaggatggaaaatgcttgtgttaagtctgtgatttgggaggaagctctttctgaagcagtcttcaaggggctgtctccttcctgcagtgcccagagcatcccagagttctcacaactgtgttcctgttttgggagttcgcactgggttccctctgaactgraacactctctttctcccaacccctgaacccagacctcccaccagggccagcttcacaggcatgccctgtgcttcaagggaccccgtgcttgttttgacgctttgttgtcgccgtcttgagattcttttttattttgttttttgagacatgatcttgctctgatacccaggctggagtgcagtagcatggtcatggctcactgcagctttgacttcctgggctcaagtgatcctcccgtctcagcctcctgactagctgggactacaggcacgtgccaccacagctggctaatttttttatttttggtaaagatgaggttttgccattttgctcaggctggtcggaatctcatgagctcaagcaatctgcccacctcggcctcccaaagtactgggattacaggaataagccactgcacccagccccaaattcacaataatttttcaacaaggggctctgtgttttcattttgcactgggtcctgcaaattctgtagccggtcctgcctctactgctagctctttgcccatcagagtcacttcctcaaagggccttccctgtccctttctcacatttaaaaaatctaccccccaattaccttcagtatctttatcaatcactctgattagttgtctytgcaacatttaattatttcttgagattatgtctgtttttgtttgtttgtttgtttgtttgttttgacacagtttcactctgtcacccaggctggagtgctgtggtgtgatctcagctcactgcaaccccacaggctcaagaaatcctcccacatcagcctcctgagaagctgggactacaggcatgcatcaccatgtctggctacttttttttttttttttttttttttagtatttttagtagacactgggtttcaccatgttggctaggctggtcttgaactcctgagttcaagcaatccacccacctcggcctcccaaagtgctgggattacaggtgtgaacctccacaaccggctcctaaaagattacgtcttttatttttttatgatctacttggttattacctgtctccctacactggaagcaagttccgtgaagccagggccatagttatagtggtctctgtttttccccactgcctaggctggtgctggctcatggtaggctttgaatatctgctaaatacatgaatgaaatgagctgcaacaagcttgccaaagacagaattctgcattacgggggaatgtaaaacatgtgatgaatgagtgtgggaatggatgaacgaatggatgaatgaatggatgaatgaatgaatggattaattaattaattaacaggtgaataggcattttrtagttgttgctctttagcagcagtaaatttttgttttcataaaattctttctccttgtatcttgtgactttggagactagttctggggtgaaactccaattttaaatttttcttctgtctttgataggatcatgcaaactcagcctttctctcctttctcccagctggcaagggctggctgagaatatgaatccaacaacctcrttaagctctctcctcccatctcctcccctttgggttgatctcagggcagggattagaacttggcctttccttggacttggaaacagtccctgaggtttggaaatcccatgcaacacttagaaacagagctaatgagaacattacatgatgtggcaaaatcrctgcttacatgctctgaaatgagcacggttacaagaacctcctgttctgtgtgatcccattttgttggacaaacagcatgtggttagtagtgcatagtgggcctatgatgagacactcaggttcaaagctacctcttcctagcttgtaccccgacttagtatgaccctgtggggtgcgcatgtggactgaatggaatgggacaggttcaggattgctgagattgcagctggaatcctgaaacttaaagctatgaaattgaagttcataaattagtggtgaactcatttggcagcaaaacctgtcctgaattgatgtgaggttatgtatagtaattatttatcctattctgctgctgaaatattaatatgataatgtggaacagaaagttttaccttcctaaaaacaataatttccaagttccaaaacrtatcaggccctgggaatttcagataagggattatggactatatataacatgcttagaatagttcctggcatatagtaagcacaaaaaatgcttctgcttagtaaatgtgcctaataaatgtgtgtgtgtrtatgcgtatgtgtttgtatgtgtgtgtcttagagggactgtaaagagtgtctccaaatagtaaataatcattttatgtggtatgattatgagtgatttaaattttcttctgcattttctaactttctgctctaaatgtcattttataatgcattttracaatgtataataataaaacagtataaaaatattgggagaaagagtaaaccaatcatctcacttcctagataggaagctgaagcccagagacattccaggcctctcagcaaggtaatcagaggcccagagcaccatttgaacccagaccctcgttagatgtggatgtgaaatcagtcaacgaactgctagtattagtgtcactgcctaaccttcccccagcgggtaagaggcttggactccaggacgggcacctccgtcctcctcctaacttgttctttctattagtgggaagggttgggagattagggtagtttatggataacctttaagtcgtatgagcttgaggacatcatctaccttctcaggggccagactggacactctgaggttctttgtggctctaacagttggtggctttgttcctttatatgtggaggaatggacagcagggagggggctgggagatagagaaggagagtagctggaaaatggcagaaaagtttgttaatttacaggcaggctgaagcgggaggatcgtttgagcccaggagtttgaggctgcagtgagctatgattgtgccagtgtaccccagcctgagcaacagagcaagaccctatctctcttaaggaaattgttaatttagaaccattttctccctggtaaatgaccacagatagtctgggttctaggcaagagagaggacacactaagggatgaaatggtaggtggggaagtcaaggtttgtcccatccattcgttggcccaggagcagttattgcaacccctctgggtgccaggcagtcagttggcactacagatgcaaagatggtgagatacagcctctgtccttagggagaccagggcaaggggtctgagagcccacaggccagggcattccccatcatttttacagagagagctgtggaatagttaagagcacaacacrctggtggctgaggctggaggctggtgtgctggcttctccacctagccatcatgtgacttggggccaagttctgtgattttctgtgcctcagtttcctctgaaatgaagtcatcgtgttacctccctcacagggttgggatcaggcttcattgagttgctgtaagtacagcactcgaagcagcacccatggtgcgatcatggtcattagatccagtgcacggcataagagcccaggacccacaatcaggtctggattcagacctctcctgttacctgtctgagctgcaatttcctgctctgttgaggcaggataatactagtgcctactttaggagattgttgagatcgagtgggagcaagtgctgggggtggacggcccagaggtggttcagtagccattagttgggtgggcttcttccaaagttcttgcctgtgcgcatggttattcccaagccctggccgggcttacatcttaaaggtgtagcaacctgtgtccacggaggaggaagaggattgaaaaggcaggtgaagtgtcccgataaaaggataaagtccaaaacagcagatgggtgctgaagtgttccttcccgccaccatttacgaccatgttgggatcactgaggtaagaacagtttagcaaggcagaccttggatcccaggaaggcaaatgaggctctgtggggtctggacatacagagggggccctgcaggcaaaggtaggtgaaggaataccaggaaagggagctgacaccagggacctggcatcgcccccactttcccagatagcagactgggtgggcttgcagtgcagcctcccagctgcttgttcgtcatcccagcccacatctcttatcggctccaagcaaggaacaggtcaggaaactaaattgtctatgcatatttttatgcgcccctgagtgaaatgccaaggatcttcctgtaatgtttaatttattcatttattgacttaggaaggggctgggagaaactctsktttcaagtctctttagctcctaaaatgtttactttttctttttctttttctttttttcttttcttttcttttttctttcttttttttttttttgagacggagtctcgctctgtagctcaggctggagtgcagtggcacaatttcagctcactgcaacctctaccgcccgggtcccggttcaagcaattctcctgcctcagcctcccgagtagctgggattacaggcatgcaccaccatgcccagctaatttttgtatttttaatagagacagggtttcaccatgttgtccaggctggtcttgaactcctgacctcgtgatctgccctccttggcctcccaaagtgctgggattacaggtgtgagccactgcgcccggcctcctaaaatgttttctaggagcttgggggaaagaggatccctgtctttgagttgttcttgtattaagttaatacaaggtacagagcaactaaccattcatacattcccctcccccttaagcatcattgccctattttagaaaaattattcacttctgctctatacttaatgtaacacagtcccccccaccccatatattgaaagagattatttcattttgcttttctgcaaaaatgaaggcaaattgtatgtggataattttatagttgaggaagtggagagacgggatttacttaaggtcatccgtgaggggaagggtaagttcaagcccatggatggcacagtctttctaccacgctgctggccacatgcatgcrgattttcttgttgattttgtgtgtgtattgttcattgacctgggttttccctctgcaataccagtaagtaaaattgagcttctagtaagtctgagaggaagggcttaatgcatgagacagcaactaccrccatgcttgaactgtttcatcaaaaagcacaacaatggatgtttgtataaaggtggtgttgtgcttgkaggtggatattaggttggtgcaaaagtaatcgtggtttttgcaatcccttttaatggcagaaactgcaattagttttgcaccgactgaatattattcatttctttccgtcttctattccctaataatgcaattagagaaaaatgcaaggtcatgatcactgtgatgaaatgatgagcccacccatctaaatgaaatcccttatttgagaccctgggtcatagtgagatgtgtgaggctgtctttcaggctgtattagcagagaagtgagaatatctatacagtgtttaagtagtgttggggtttttgcaatagagaataaaaatctagagcaatacaagtatgctggcaagcagttctcttctgcatgatcctaactgactttggtagggttggggtattttgaaatatcttcatttcttgattttcattgctttccctattttgaggtggttacatttacactggggatatttgggggatgaatacttgttggttttggtttgaatctctaaaaatcaggatacagtgggttacttttttggaggaggtgaagrcaaggctgtgaacaccttcccagaaacttgaagaactgagaattttgtttatctgttttttttcttaaacctgttgttgaaatgttatttaatatatggtcagrgcatagctatccactgctgtcaggcatggctgcttaaacaggggcccagggtgtttatgttgtggccaagtacttggcacccccgggaagtgtggccctgcctgtgccttttctttcttcctttctttctttttttttttttttttttttttttgagaaagggtcttgctctattccccaggctggagtgtagcgagatcatggctcactgcagcctcagctacctgggctcaggtaatcttcccgcctcagcctcctgagtagctggaattacaggtatgcaccaccacgctggctaattttcatatttttagtagagatggggtttcactatgttggtcaggttggtcttgaactgctggcctcaagtgatctgcctgcctcggcctcccaaagtgctgggattacaggtgtgagccactgcacgtggccttcctgtgaagtgaatttttaattgtattttaaaatttgttttcatgtttttgtttgttttgagacagagtcttgcaatgttgcccaggctggaatgcagtggcctgatctcggctcacttaaacctctgcctcgtgggttcaagtgattctcctgcctcagcctctggagtagctgggacttcaggccaccccgccaccacacccagctaatttttgtagttttagtagagacgaaatttcaccatgttggccaggctggtcttgaactcctgacctcaagtgatctgcccacctcggccccccaaagtgctgggattacaggcatgagccaccatgcctggcctgttttcatgattctgatacattatatttttacacatttataggatacatgtaaaattttgttacatgcatagaatgcataatgattgtagggaccaagggaatatcttctgctttgccctctgaagtttcgctgaaaaattaacttgtaaaaaggcagattagttggagaaaagacacacaaatttaattaatgtgtacactgggagaaccgcagagtgattacccagaagggaatttactggccagcatttacattatttttggttggtttgtkggctatgaaagtaggctacctttattattactgcgatgacttctaggtagtgttttggttctttgcatttattacattacttgaagaagcattcattcatttatttttgattttttgagatggagtctcactctgtcactcaggctggaatgcagtaccgccatctgggctcacttcaacctccgcctctcgggttttagtgattctctctcctcagtctctcgagtagctgggactacaggtgtgcaccaccatgcccggctaatttttgtattattagtagagacagggtgtcaccatgttggccaggcyggcctcaaactcctgacctcaagcgcctgcctcagcctcccaaagtgctggtattacaggcatgagctaccaggcccggcctcattcgtttattctaactggaatcggtttgtctgagttcaagaccctgggctctggcacttcagataacatgcatctctgggccccagtttccttatctgtattatagggataaaaacaataagattgccacgaggattaagtgacacagaggaacaaaggagcacttagtaaatgttagtcttaccagaagtttatttcggatcaccgggctgctggggtcctccctgtcctggaggcactcgcttcagtagcggacccaggtggtgcaaagtgcgtgctagaagcacactgggtgattgcgcagccacctgtcccagggagtggaggtgaaaagatgagagaaaccaggactttgggaaataaaagtcgacttgacaacagggacttttaacgggcacagtggcgacctctgactcacattttaaatttcccatattttccaccgcttccctatcgtgtgtgtattcaagcatatcaattgctgccaatatgtaggggtgtcccatattggggagcaaagcagaagagaggctttaaaaatatatatctccgcagctcatttcggctgccgaagctcagcggcgggtcggaggtaggccggcccgggggcggggctccgtccggaaggcggggccctcctggggcggggtcggtgtgggggcggggcctgggtggggcctaggcgggcgcgatggcccgggactctggcgcgcagggygcatttcgggatggagcaagcgcagcgcgaagttgggcgcccgccggctgcagcagaaccccgcccgcggcgctstaggactgcatctcggcctccgggtcgcgacctggctgtcctgctgggtcccgggcctcgggtcggcttcaggcggttaaggggtgcatgctctgcacccctgcgggagcccggtgggattggcctgcggggtggtcaacatgagtcctgccaagtgcaagatctgtttccctgatcgcgaagtaaagtaagtaagcctgcaattgtaatgaccatgatcttttacaaacttacgcagtcttccttccccttgaagtcaagctgtgtgtcctcttagcaccgccccctttaccsccacccccatccaaagaaacacgggcttgagttggctgctggggagatgatgcccgccttggaaactctagctggccttggcgggaggggaggaaggaggctggacgttgggggtgacgttgcttggaggaggtcgcttcggagcacacaggtgcctaaagatcagcccttgcgcaggggcacgccttccccgctttctctccttcgcctccagaagctgatggttgtggaaggcaggtctcttttgaagctgaagcctgggcaaatcgacgtgaacttgagcaggctctcattgagggtcattttctgagcagatgagcgtaggcatctcagtgcctgagtgctttgtagctctacctacttggttttgtttctttccttttttgtcctcattttattgcacttaaaaagaattaccaaattgatggtgtgtctgttgttgacaattcagaaaattatagataagcaaaaaagaggaacaaaaatcacccataattccacccctgtgatgtttgttaacagttgtatattcttcagcttttttttttttccggtgcagatatgttttaatttataaacttgaatcatgcagaacgttctgtaactcactttttcattcaacattaagtatttttctaccactgggcttggcaaactatgacccactgcctgttttgggatggcctgcaagcagagaatggttttttcatgtttaagtgattgaaaaaaaaatcaaaagaagattgttttgtgacacgtgaaaattacatgaaattcaaatttcagtgtctacgaaaaaagttttattggactgcagcctgctcatcgatttatgatttatgcctagttcatggctgcttttgtgcctcactggaggatttgagtggtgggacagagactgaccagatctaaagtacttactgcctgacccttgacagacaatgtttgccaatccctgcctacaacatgcttttactggattcatagtgttcctttaaatgggtgcaccttaaaatgtatgaataatcctcgccaggcagggtggtgcaagcctgtagtcccaaatactcaggaggctgaggagggaggatgcttttgcccaggagttggaggctgcagtgtgctatgatcgttcctgtgaacagccactgcactctagcctgggcaacatagcaagaccccatctctgaaaaaaaatgtgcccaggtgtggtggctcatgcctgtaatcctagcgctttgggaggccaaggcaggagaactgcttgaactcgggagttcgagaccagcttgggcaacatagtgagacccccatctctacttaaaaaaaaattagctgaggatggtgatgcatgcctggagtttcagctactggaaagactaagggaagaggattgcttgagcctgggagatcgaggctgtagtgagcaatggttgtgctattgcactccagcctgggcaacagagcaagaccctgtctcttaaaaaaaaagtataagtaatcccctataagtagcggatattcaggctgtttctctctgttttttttttttttttkggggggggctattatcaacagcacagtgaggagtacccctgtagctgaatctctgcctccatcctttattttcttaggatatgtttacctggtccataaacattcatgcacacctcccatgcataaggcctgcaactggtagcaggaagggtcgcaaaaatggttggaaaccgtgacctccgccctccaggaacttcggttccattgtggaaggcagatgtcttctcagtaactccaattcgaggctgatgggtgcaacagtaatagccactaccactcatggggtgctttcagtatgccaggccaagtgctttgtaggtgtggtctcatgccatcttcaaaataccactgtgggggcactaagtggagrstgttgtacccatttcacaaaccactttaatggaaaaaaaraaaaacctcacacaaatttggaattgtcccagcaagtccaggacgtggggtccccctatttataataatatggacatactttgttgggggactacattgttcctctcttagcttagagtggctaaaaagatggatttggacgatctaactttgccaccaagctgtgtgatcttctggagcaggtaccatcaagccttggaacctcagtttccacatctgtccaagggactagccctcataggcctttctagagttgttattattattattattattattattattattattacagacagggtcttgctctgttgcccagacagtggcatgatcatggctcattacagcctcagcctccgggctcaagcagtcctctcacctcagccttccaagtagtgggaccacaggcatgcgccaccacacccagctaatttttgtattttttagagagacagggtttcaccatgtttcccaggctggtcttgaactcttgagctaagcaatcctcacaactcagcttcccaaagtgctgggattacaggcatgagccaccatgcccggctctttcttggttcgttgagaytctgtgtggaagtcgctggtcttgagtactgccctgggtcagcacaaacattgatgaaaactaataagtaaagacagagttcggttatgaaagagccctctggagttgggaggcatttgggatcttgtgctgaaggctcgggccatctaagaagccagaactcctgagaaggtgaggtcgsaaatgatgactgatttttcatggcatgagaacggggtcacagttcagagagtagagaaatgattgtggatcagagtgcagaagggcttgaaataaagttggggatgaggaggcagaagttgttttttaatgagtcccatttcactgccatgcaattctgctctgaaaggccagctgcctgcatgcaaatattggctgtagacctatcaggggttttcactcttggctacacattagaatttcctggtggggagatttttgaaaaatctggatgcyggggaccccacctctaccccctagacatgctgatgggaccccgacatcagaatcttataaagtttttcatgtcagggttgaaaactcgtgcctagcttggggtcagcagactgctattataaacggccagacagtaaatatttttggctttgtggccatgtggtctctgttrtaactactcaactctgctgtttcctgcaccagaagccatagttatgtaattgaacaggcctggctgtgtttcaatcagacattatttatagatggggaaattcaaagttcatataatttttatgtgtcacaaaacaggattcttttgattttttttttttttcgatgacttaaaaatgttggctgggcatggtggcttatgtctatagtcccagcactttagaagaccaagacaggagggttgcttgaggagtttgagaccagtctgggcaacatgatgaaaccccgtctctacaaaaataaaccaattagttgggcatggtggtgcacacctgcagtcccagctactcaggaggctgaggtgggaggatcacttgagcccaggagtttgaggctgcagtgaactatttttgcaccactgcactgtagtcctggcaacagagggagaccctgtctctataaaaaacaaataaggctgggtgtggtggctcacacttgtggtcccagcactttgggaggccaaggtgggcagatcgccctgaggtcaggagttcaagaccagcctggccaacatggtaaaaccctgtctctaataaaaatacaaaaattagcagagcgtggtagcacacatctgtagtcccagctactcgggaggctgaggcaggagaatcacttgaacctgagaggtggargtagcagtgagctgagatcacaccgctgcactccagcctgggcgacagagcaagactccctttcgaaacaaacaaacgaaacaaaacaaaaaacaatctaaaaagttaaaaccgctcttagcctgtgggagatacaaaaacaggtggccgagtggatttgacccatgggtcctagtttgcccactcacccctggcctagccaaggtagtcatcccagggggtactgatggggcaggtggcttgagaaatttccaagggtccatttctggagagcgtggttttgtgctgtttgaacgatatcaacctttactgggctacacagtgttctttcttgctttcttgtttggaagtagttgtaattacagaattgcctggctcagaatcagctcttagcagtgcgggtagccgttaccatctctattttatagaagaaaagagagggaagraattgaaggtctgattaatgccggggccctagcctaatggcccagcctgggctcctgtaatgctatcctgcagacgtacatggtagctaaagtgttgcaagctgtttactttggctaggtccagggataaactgttaattccatcatgtgaggaaactgaggcagggagtattgaagtaactttcccaggattacacaggttataagcggtagattctggcttcaaagcctaggaggatggccgcagtctaccagagtttctaaactgcggctctgttgacacttggggctgtccagttctttgtggggctgtcctgtgcattgcagggtgttgagcagcatccctgrtctccacccactagatgccagtagcgcatcccccaagttgtgacaatcaaagatgtctccaggtattgctccccggggagcaaaatttcccccagttaagcactcagggctgggcgcggtggctcacccctgtaatcccagcactttgggaggccaaggtgggcagatcacctgaggtcaggagttcgagaccagcctggccaacatagtgaaaccccatttctactaaaaatacaaaaattagccaggcatggtggcaggcacctatagtcccagctactcgggaggctgagacaggagaatcgcttgaatctgggaggcagaggttgcagtgagccgagatggtgccacttcactccagcctgggtgacagagctagactctgtctcaaaaaaaaaaaaaaaaccaaccaaccaaacaaaaamcctcagcattatacatgtttgtctcttatttgagaggaatataagaggccatatgtgtaatgcatgttttaaaagtccagttaatagaggggcttccatttatctcagattgtctttctgcctagaagttagattctgaggtcagctagagttggatttgaaacggggctctgccacttgccagctgtgaaactggaggtaaatggtcctctctgaacctcggtttcctcatcgtgaacctggagatgacagactcctccatacagggctgtggagattcactgagaggccccctgtgcccagtccatagtgggcagccgagaatgtttatttcctccattcctgatactattctgcctggtcttgtgctccggcagctgactgcatttggtgtttggctgacacctctgctgttgattgtacctgaagtcatttccaaagtcaccttgaaacatttcagctctcacccttgccgtgctgtataaggacagggcttctcactggacaatggcacttaggatgatcctccttcagtggaagcaaatgctggccgaaggtcagctctctagagccaatgttggttggcttccagctttatcaaaaagaattaaaatagccmcttgcccggagattgggcctgaaacaaggccagtccggcagctttgtgtgttcgcttgcctagcctgcggtaatgggcttgtggcctgcctgatggaggggctctgtcaccagtttcgaaatcaacatggtggccaagaatggtttttttgccccctaggccacaaatgaagtttttctttgttgtgctttaggtcaaattgctagagttttaatgtttgtgtgtgtagaaatgggatgtctcagactttctgaagctgaaccatcaagccagccagtcagggaaggtcgtggacagaatgaggggtgcggctgtgtgtgggaatgtcgattagtacaacctctgtggaaaacagtttggagagttctcaaggaactaaaatagatctgccagtctctccagcaatcccactactgggtatgtacacaaaggaaaagaaatcactcagtcagattcgcttttcattgggaggatcttaacatgattggttgaaaacaataaataaaattagcaaggagtccagttgtggggtctcacgcctgtaatcccagcactttgggaggctgaggcaggcagatcacttgaggtcaggagttcaagaccactctggccaacgtgtaaaaccccgtctctactaaaaatacaaaatttagccggacatggtggcgggcacctgtaaccctagttgctcgggaggctgagggaggaaaattgcttgaacctgggaggtggaggttgcagagagccgagattatgccactgctctccagcctgggcgacagagtgagackcagtctcagaaaaataaaataaaataaaataaagaaataattatatcaaaagacacctgtacttgtatagttatcacagcactattcacagtagcaaagatatggaatcaacctaagtgtccaccaacagatgactagatacagaaaatttggtgtatatatatatataattttttatggctcagtagtattcttttktgtgtrtgtgtgtgtgtggtgtgtgtgtgtgtgtatacctacatgtatacatgggtgttcctcttacaaaattaatagcttttttcttattgaaaataacacatcattgcagaacattttttaaaayatagcaaagagataacggctcttaatactttagcatttttttcccccagatcaggggtctgtctacaaatgatgtcccttgggttgcatctacctttttttgtaaataaatgaagttctctttttttttttttttaggtagagtttcactctgttgcccaggctggagtgcagtggtgtgatctcagctcactgcaacctctgcctcccgggttcaagtgatttttgtgcctcagcctccccagtagctgagactacaggcgtgcgccaccatgcccagctactttttgtgtttttttagttgggatggggtttcatcatgttggccaggctggtctcaaactcttgccctcaagttatctgcccatcttcgcctcccaaagtgctgggattacaggcgtgagccaccgtgcccagcgtagcattaaccttttagaagctagaaagcagatgaatgagtggtcactggcttaaggctgagtcctaatggagcagtgaggaaagttggggacccctggccatctgtaccacagaacccccaaaaggcatggtgtctggcagcaagggatgcccctggagctgaggggtaaggagggtaccaaaatgagaaggacagggtggaagactcccaggtcccctcccctgtctcctgcggcaggggctgtccacttcgaccccaacagaaggcagcagttcaaaggtacatatagagggtcttgggagaggggatcgacaggcacagttgagggcatggggcctgtatcccaaataggaagataagggtctgaataggtgctgaattcttagaacttccccgttccccccggggctccaggctgacctttactgtccaggcagaagactggaaaacttctccctggggaatctggccagcgagagagaaagacacraagatactgactcaggggatccccaacgcactcctacctcaccctacattgagctcagggtcaaccaggtccaccacagtctcagaaattctgttctcactcatagtcacaaggttggaaccaaggcttccctgacatttgggttcagtttctttttctttttcttttttgagatggagttttgctcttgttgcccaggctggagtgtaatggcacaatctcagctcactgcaacctccgcctctcaggttcaagcgattctcctgcctcagcctcccatgtaggggggattacaggtgcacgccaccaagcccggctaattttttgtatttttagtagagatggggtttcaccatgttgtccatgctgctctcaaactcctgaactcaggtgattcacctgcctcggcctcccatagtgctgrgattacaggcgtgagccactgcacccggccctgaggtccagtttctcatatgtaagtcaaggtccaaaccagtagacacaggaagcttggaagaaacagaaaccacgctggagaagagaagtttaaaaagctctcattaatatcatcgttgaggtcagacaggatgttgcactcataggaagaggatgctataacaaagggaacatttgtaggccaaaaacaggctcgtagacatcaaaaacatgatagcagaaatgaagaactccactgaatgtttagaagatgaggctgagaaaaatcaaccagcaagtagaagaagagagagaataggagaggggaaaaatgcataaaccagtaggccagtgtaggaatttcaacatccagataataggacttcrggaaaaaatagagaaaaaaagaggcaaggacatcatcaaggargtatttgtttcttgttgttgttgttgttgtttgagatggagtctcactctattgcccaggctggagcgcagtggcacaatcttggctcactacaacatccgcctcctgggttcaagtgattctcctgcttcagcctctcaagtagctgggattacagaygcacaccaccatgcccggctaatttttgtatttttagtagagacggggtttcaccatgttggccaagctggtctctaactcctgaccttaagtgatcttcccacttcagcttccaaaagtgctgggatcacaggcgtaagccaccatgttcagcccatcarggaagtatttgaagacaaattcccaggatggaagtttccagattgagagggcctgagagatgtgcagcctcattggtggaagcagacacatacttgagcycatcactgtgaaatcatagagttctggggacagagggacgctcctataagcatctggatatgaaaaaacaggtcacctacaaaggatcaaggatcagaattactcttgttctagcagccttggaagccacaacacaatggcacaaggcttctaaaacttgaagaaggttttccttcctgaaatttctttttgtttgagatagagtctcactctgtcgcccaggctggagtccagtggcgcgatctcggcttactgcaacctccattctctgggttcaagcaattctcctgcctcagtctcccaagtagctgggattacaggtgcacaactctgtgtctggataacttctgtatttttagtagagatggggttcaccatattggccgggctggtctcaaactcctgacctcaagtgatctacccacctcagcctcccaaagtgctaggattacaggcatgagccaccatgcctggcccttcctagcatttcacacacagccaagtggtaaggttgaatgtgagggcaggagaaaggctgaagtgcaatggtgcaatcctagctcactgcagccttgacttcctgggctcaagtgatccttctaccttagcctcctgagtagctaggactacaggcaggtgccaccatgcctagctaatttaaatttttttttttttttttttgagatggagtctgaccctgttgcccagtctggagtgcagtggtgcaatctcggctcactgcaacctccacctcctgggttcaagcaattctccctcctcggctttccaaggtgctgggattacaggtgtgagccaccacgcctggccctgaatagcctttcttagaaagctacttgaggatgycttccactgaaamcagagggtaaaccaaggaagagcaacacacaggagacaggaaacaggagattcaacatagactgaaagggagtctccagggtgatggtgataaggaagcccagtcaggaatagggcagggaaattgagggcatcattgtcatgcgccttgccattctaccatcttcttaagtggatgaaactactggaggatatgccccagcaaaacaagggagtctaccaagaaagacgagccacccattcccccaaattaggaatccaaccccaaggaaaggcaaagggaattctagggatgtcagcaaagggaagccccaaaacaatggtgatgtaggggcctagaggacagccagtacctacggaaggagaacagaggccttcaggagagatgtcaccagtggaaaaaaacagaactgatmaattatttattattattatttttaatgagatggggtcttgctacattgcccaggctggtctcgaactcctggtctcaagcagtcctcctgccttggcctcccgaagtgctgggattacaggtatgagccactgcatgtggcctgatcaattatcttatgtgtactgggaatctattaggaggagtggggtgatttagcaacaggtacaaggaacactaagtaaaggaaaaaaatcattaactccaggaaaaggcaaaaagaaaggaactaaaatctggtacactgcagctctcatatgtgaataatgatcacaaacttcatatgtgaataatgatcacaaacwagtaaaacattgaatacccagtttgctaaattacagtagacttctatggtattgaccagctggtggaggggagccgatggggtggccttgtgagataactaaattcacatctctcaggatgggaaggccatagatgctgtctcacatggatgactcacaagattgcatacacttgttgtttaggactatggagatgtgtaattgctagaaaaaatcagcatcagtttcctctggtgtggagggacagagcaggwaacctgttttgttgttaaacatttaaaaaattgttttcagttttctaaagaaattttgtgggctgggcgtggtggctcatgcctgtattttggaaggccgaggtgggaggatcacttgaagccaggagttcaagaccagcctgggcaacaaagtgagacccctgtctctacaaaaaagaaaayttaaaaacttctgaaatacaaatgtagaaaagtacatgaaagatattaataccatgtaacaagtcggaacgattagaatgtgtggacttcttccctgatcataaaactctcacccttgttatargttttttagtattattcaggttcctaaacaatgggcatgtaaagtaaaaattaacttaggattaaaaatctaaacatccaccttgggacaggtagaagaaactgctccttctagttcatgtgctggtaccttagctggcctcttaaggtgctttcagttgggtacagtggttcacgcctrtaatcccaatgctttgaaaggctttgacgtcacttgacatcaagagtttggacgagcctgggcaacatagtgagaccccatctctacaaaaatgtttaaaagtcggctgggcttggtagtgccctctgtggtcccagctacccaaggaggtcgaggctgcagcgagccacgattgcaccactgcrtactagcctaggtgacagaatgagatcccgtctcaaaaaaaaaaaaaaaaaaaaaaaaaaaaccgaaggtgcttcctgmccttgagcctccttgtaaattgcttcaggggctctggagagcaagtgcaaagcaggggggctctggtgcagtttggctcctctgctccactggctttacaggtgccgagctctgagtcccaggcttcttccctcatgcacgtctgtccctcattcttattctgcaggccgagcatgtcgggactccacctggtgaagaggggacgggaacacaagaagctggacctgcacagagactttaccgtggcttctcccgctgagtttgtcacacgctttgggggggatcgggtcatcgagaaggtacagatgggtctcggcactctgggtggggtccgattggggtgcaggggcccctcctctcagctggaggtgggagattcgggttcaggctcattctgcctgctgcagagagggggtgagggccacgctcctctgagttttaatagtttaaccctcaaatagaaataatagtgaagcctctttcaaagggctattgtgaggatgaaatgaaataagacaggtaaaacacattgtactgtaaaacactcaaaaagtgttaagggtgatcacaatgacaccaaaggaataaaaaaaaaatcattcactgggctcggcacagtggctcatgcctgtaatcccagcactttgggaggrtgaggtgggcagatcatttgggcccagcctgggtttgtgttcaagttcaagaccagcatggacracatgacaaaatcctgtctctgcaaaaaaattaaaaaattagcaggatgtggtggtgtacacctgtagtcccagctactcgggaggctgaggtgggaggatcacttgaagctggaaggtcgaagctgcagtgagctgtgattgcaccactgtactccagcctgggtgacagagcaagactctgtctcaaaaaaaaaaatatatgtatgtgtrtatatatatatatatatatatatatatatatatttcagacaaacagccatccatccatccatccatttgatgatccattcatgtggatggcagactttgagctcctgctctgtgctggggtgtgtgccatggaaatacatagaaataccaagaggaatgatgtgctgcgggggctgcaggaggctctgcagctgtgaggtggactcggggtagcacgtggcccccagcgcaggtagatgtgcatctacagctccttccttgtcttcccatgcaggtgcttattgccaacaacgggattgccgcygtgaagtgcatgcgctccatccgcaggtgggcctatgagatgttccgcaacgagcgggccatccggtttgttgtgatggtgacccccgaggaccttaaggccaacgcaggtacctgggccttgaccctctcctcccatcacgctccatccttgcctgccctcgcctcyttcccctgtgcctaggcaagtccatcctggactcccgatggtcaggacctctcatgagtctgtatttatttgtccttccttctttatttaattaaaaygtctgctgacatcaagaacaactcatgtgccttacaaaaatgcagatggttaacatgcagagaggaaattcgatctttgagaaatgtctgtgttctagcagattgggggctgtttctcctgcaggtgtatgtaattgtatttcaatcatttgttcattcttccgttcatttgcctaagtttattataatgaatcattctataaacaactgttggatgatttacttttttcctgaacagtcttatccttttataggccctactccccacagcagccaaagtgaccttttaaaagcataacttcttctgctgtattttctgaaggttgttaaaaacaaaaacctcagccagagcgctggctcacccctgtaatcccagcactttgggaggctaaggtgggaggattgcttgagcccttgagtttgagagcagcctgggtaacataataagaccctgtctctacaaaaawtaaaaataaaaaaattaactgggtatagtggcacgcacctgtagtctcagctactcaggaagctgaggtgggaggatcgcttcagcccagggggtctaggctgcagtgagctgtgattacaccgctgcattccagcctgggaaacagactgmgactctgtctcarataaaacaacataaacctaaaagcataactcaggtccgagcacagtggctcacgcctgtaatcccagcactttgggaggccaagatgggcgaatcacttgaggccaggagttttgagatcagcctgcccaatgtggtggaaccccatctctactaaaaatacctcccaaaaatttgccgggcatggtggcaggtgcctgtagtcccagctcttcaggaggctgaggcaggagaattgcttgaatccaggaggcggaggttgcagtaggctgagatcactccactgcactgcggcctgggcgacagagtgagactgtctcaaaaaaaaaaaaaaaaaaaagcaaaacaaaaaccaacataagtcaggtcttcaggtctttttgtgcttctccttaaaatgcatcagaggctgtgtgctgttcccartattagcaacctcagcaccatcccctaagccttcctgccccaagctcttcacagacatggcctcatttgttacttacagctctgttttacagatggcacagtcgaggcacagggatgtgaatttatcacttgtccagggtcacacaaccatcatgtgatgcgggtgggatgggaaccctggtctgggttcagagcatcayccagtgggtcctcccatcttggttagtctaaaattcaaaattgtcacccaggcctattaagtcccctcctggctccatctygaacctcttgccctccatcagccgggtaccagtcaccctgacctctggtagctcctgggcctgttgcagagtcttggcacctgctggaacctctattgaaggtgcttctcccagagccctttgtgcagtggactccctccccacccagcctgtaggtctcaacatgatcatcgcatytctctcagagaacctcatttattttcttcccagcactgacckgagtctgtagttattgtgtttattttcttgtttatcttctccaacataaaagaaaaactggacaaggaccaggaagcctgtctggccgctcacttcatcatctctggaatctccccgttggccgacacttctgtgtttgataaacataggaggcaggcaggccggaaggarcagctgctctgggatttctttctgtgtttgcatataaagtgccacattgttcaatttcaggatcttagcaattctatagtacagatgtcccaacccctgtgtttggattgagtctaacttttcctagtccaaaacactgctcagtggctgttctctgactttggcctcattgatgtgtgggtttttgtttgtttgtttgttgttgctttttttctgagatggagtcttgctctacctcccgggttcaagcaattcttgtgcctcagcctcccaagtagctgggacttcaggcatgtaccaccacgactggctaatttttgtatttttagtggagatggagtttcaccatgttggccaggctagtcttgaactcctgacttcaggtgatctgcccgcctcagcctcccaaagtgctgggattacaggtgtcagccaccgcgcccagccagcgtgtgtttttttaaggacatattcctagacatggaacttctggcttaaagagcatgagtattttaaaatcaaaacattgcgttatgttcagccttaaaaaggaaggaaatcccgtcatatgttacaacacagatgaaccttgaggacgttatgctggtcacaaaaagtgaaataagccagtcacaaaaagacaaatactgcatgattccatgtagaaggggtaactagagtagtgcaattcatagagagagagaagatcgttggttgccaaggacatgagggagggagagaaagggagttgttcatgagtatagagcttcagattcataaaatgaaaaagttgtggacatctgtttcacaatataaatatacttcactattgaactgtacactcaaaaatggttaagatggtaaattttgtgtgtgttttttttttaccataatttaaaactctgkattgtatttttgtttgtttstttgttttttgagacagggccttgctctgtcacccaggctggagcgcagtgacatgatcacgactcattgtagcctcgaccttctaggctcaagtgatcctcctgccttggcctcccaagtagctgggactataggcatgcaccaccattcctggctactttttttggatttttttttttttttttttttgtggagacaaagtctctgtgtgttgcccaaactggtcttgaattcttggcctcaagtgatcctcctgcctctgcctcccaaagtgctgggatgtcaggcgtgcaccaccgtgcccagccctattatattatttaatggtaaaacaatattaagataaactttaaataggactttttttaaaaacccacctctaatcccagtctgttgacagattacttccttcttccttcgttcctttccaggccttccaggccttgtccagaaacatatctgtatcacataattaaaatcatatttcattttctttacattttctttcttttttttttttattagacagagtctcgttctgtcacccaggctggagtgcagtggtgtgatctcagctcactgctacctccgcctcctgggttcaagcgattctcctacctcagcctcctgagtaccttggattacaggtgcccaccaccacgcctggctaatttttgtatttttagtagagacagaatttcaccatgttgcccaggccggtttcgaactcctggcctcaggccatctgcctgcctyggcctcccaaagtgctgggattacaggcgtgagccaccacgcctggccttctctttacattttcatacatgtttgtccattgttaccatagaaatctgcatggttctgctttccatggctgcacatagtcacatcttgtaatgttctgccattgatgtcagtctgtcagcagttccttccttctccctcccatttaatttcagagtacatcaagatggcggatcattacgtccccgtcccaggagggcccaataacaacaactatgccaacgtggagctgattgtggacattgccaagagaatccccgtgcaggtagatggactggggtgcccaagtgtggcccctgagtgtgggatgatgcccctaggttctagttcaattccacagttcacaaggggtggagggtccagatcccacaaggctccaaattcctgggctgatgtaacacagaaaagagtgttcaagtgaggcgaagcacattctgtttttwaaaaaaaattttatagacaggatctcgccatgttggccaggctggtctcgaactcctgggctcaagtgatcctyctgccttggcctcccaaactgctggggttataggygtgagttactgcacctggctgggaggcatattcttgaaggaagattgttgctcacccctttctgtgtttgcaggcggtgtgggctggctggggccatgcttcagaaaaccctaaacttccggagctgctgtgcaagaatggagttgctttcttaggtagagtgtgtccccatcagatacatgggaattggggtattgctgggacactctgctgggtctgaccctctttctcctcctgtcctgtaaagcggaggtccgtttgatttcccacctcacacttctgtcgtgaggagtgagtgagtcccagggtggaagggcacatagctaatctgccaactcatggaattaggagctgcccgcttttcaaaggaagacacacaggcagccaacaagcatatgaaaaaaagctcaacatcactgatcattagagaaaggcaagtcaaaaccagagtgagataccatttcttgacagattctgagattgtggagaaaagggaacgcttatgcactgttggtgggagtgtaaactagttcacccattgtggaaaacagtgaggcaattcctcaaagagccaaaaatagaactaccgtttaacccagcaatcctgttactgggtatatacccagaggaatttaaaatcattcgaccataaagacgcatgaacacgaatgtttattgcagcactattcacagtagcaaaggcatggagtcaacctaaatgcccatcaataacagattggataaagaaaatgtggtacatatacaccatggaatactatgcagccatcaaaaatactgagattatgtcttttgtgggaacatggatggagctggaggccgttatccttagcaaactaacacaggaacagaaaaccaaatattaaatgttctcacttataagtgggagctaaatgatgagaacatatggacacaaagagggaacagcagacactacttgagggtgaaaggcgagaggagggagaaaagcagaaaaaataactattggatactaggcttggtacctgggtgatgaaataatctgtaccacaaacccctgtgacataagtttacctatataacaaatttgcacatgtaattatgtccatgtccttgtgtagtttaggggaatcatttactatcatgtaataaatccctgcttctccttaccggtgggtctgaaaacagtcttgcccaaatgtgaagcaactcagtgcggatcaatacatgatattcacctgaggtacagccgggagtcccatgcccattgacgttttctttgtctgtggactctgagtacatgtgggcatctgtcctgtctgacagttacccaggactctcattatcagtcttaattcctctggaggttgatgatccagcccactggacaaactacagctcataggccaaatccagcctatggcttgcctttgtaaataaagttttattaaaacatggtcgtgcttattcgtttatgtattgcctatggctgctttcacccaacactggcaaagttgagtcattgtgacagagacctgcaggctcgcacaactgaaagtatttcccatctggctctttatagaaagagtttgctaacctatggtccagctctttgagctcctagcttacctctttgatctagctttctgccttccctccaaagtgaattttgtatatgccactgtagcctaggttgtaactcacaacaggtttacartccacatacgttgaaagttgactgatgcaatagcagactaacagattatttttcttccctgacatgaggttaagctccttgagagctgggaccagagaattttctctgtcatctgctccttacctggccccaccaccgtgcactcggtcggccttcagcctcgagggtcttgtgactgacyggattctgcttcccttcttgtcccsgattcctcaggccctcccagtgaggccatgtgggccttaggagataagatcgcctccaccgttgtcgcccagacgctacaggtcccaaccctgccctggagtggaagcggtaagggaccccgagcttccctctgggggagcttctcagcccagtcttgataatgtgaacggtcagggtgacagaagtatgcttgtaacaattctttccattacaaatgttacttacttttattttttagtcattagcaaaatattttaaaattttaaattagtaaacaagtggtataatttattgtaggcaatttagaaaatacaagaagtacaaaaaagaaatggaaatcattcataatcctatgacccagtgttgaacatttattacattgtaggtatctacctttccaacctttttctgggcatattctttgggaaaaaaaaaaaaaaaagacagatcttggccagtggctcatgtctgtaacccaaccccccaacccagtgctttcagaggctgagggaggaggatcacttgaagccaggagttcaagaccagcctgggcaacatagcaagaccccatctccagaaaaagtaaaaaaaaaaaaaattaactggttatggtggtgcatacctgtagtcccarctactgaggaggctgaggcaggagggtggcttgagcctaggaggtcgaggttacagtgaactatggtggcaccactgcactccagcctgggtgatgagaycctgtctttaaaaggaaacaacaacccatcttacatttcctagtttgtgactttttttttcctcactaatgaatatctttctatgtaaaaaatacactttacaccatttaagatgcctgcataggattatatcttatggatgtatcataatttacttaacagtcctcatggttaaacaatttaggttgtttccaatttattttttctaatttaaaaaatattcaaaggaatggagctttgataatcttacagctaaatttatgtgtgcattttaataattttcttaggataaattcctaacagtggagtttctaggacaaattaaaaaataaataggaccgtctcaaaagtttcctattaaatttgtttttttttccccccccaaaagttgaattttaaatttgggatggaaaatttgctttcatttgttaaatctttgcatggtgttgggaaataattattcacatataaatgactccataaggtagaattgggatttttttttggatttagattaatatggttgttgttggtcgactcagtctgagtttctttccttttttgttgttttgttttcgagacagggtctcactctgtcacccaggccaaactgtagtggcatgatcatagctcacagcagtcttgacctcctgagctcaagtgatcctcctgtatcagcctcccgagtagctgggactacaggcccatgccaccatgcctggctaattataaaattttttttgtaaagacaaggtctcactatgttgccagggttggtcttaaagtcctgggttcaagcgattccccccacctcagcctcccaaagtgctgggattataagcatgagccaccacgcctggcagttagtttcttaagcttgatttctcattcaaggttgggttagttcttgaggaaatgaaaagccattgtgagaagctgaagggagtgtctgtattccgctggtccagaagcccaggtctagcactatgtcagcagggagaggcgctgtggtttctgggttgtgtgtgtttctcctggatttgggaggaatcaggtttctttgtgactctccaggcctgacagtggagtggacagaagatgatctgcagcagggaaaaagaatcagtgtcccagaagatgtttatgacaagggttgcgtgaaagacgtagatgagggcttggaggtaaatgcagagcctgtgggggccaggggagccagaaccgaactgcctctgtcctggtagcagttggcaactggctaacctctaaagaggtctgtttgtcctttgcacccaggcagcagaaagaattggttttccattgatgatcaaagcttctgaaggtggcggagggaagggaatccggaaggctgagagtgcggaggacttcccgatccttttcagacaagtgagcagttcttgctgtgtcttttcgcatctgtctttgggaattgtttgtgggctgccagattatttctcttagcattattctgtgacagtcaagaagacatttgtaggagctggatgtatcgttgtatcgtattttgcaacaaacgcgtacatttttactcagaaaagcccatggttttgtgtcgatcttgacagaatcttttaggtagttcaagtctataaatcagtgtatctagaaatgatttcagagatacaggatcaaaatagctgtttgtgactatattggcctatagaggaatgggatattttataaatattagtactcttgttatttctaatgtttctagatggtctattttattttatttttgagacagagttcactctgtcacccaggctggagtgcagtggcacaatctcagctcactgcaacctctgccttccaggttcaaacaattctagtgcctcagcctcctgagtagctgggattayaggcgtgtgccaccacacgcrgctcatttttgtctttttagtagagacagagtttcaccatgttggctgggctggtctcaaactcttggccttgagtgatccacccgccctggcctcccaaagtgctgggattacaggtgtgatcygctgcgccctgcctgatcaattttaactgtaggaacgaattgcacatttacttactggtagctagttttcctcttttaaaaccttatgtccgttatcagcaatgtttagaaaacatttatactgacaatcttcccattcttaaagctattttaatatttctagcttttcttctagaccttcttcatatgtatattttaaagagctgtattcagtctacacgaaattttgctctgcatttaacacattccaaattgtagatcatgaatattattatgttattcctgccttggcaattattttgatgattactcaatattttatgtgtggcaatagccttatttatgaaacctttccttttttgttaaatgtttagcttatttctactttgttattatgaataataataccacagtataatgtgatatttagtactataaataacacttagctcttttttcttcttaattattttcttggataaagacttggggagaaagacttagttaaatagcacacactttacatgcactttgaaacacatatcagtacattgctttctaggagttttactaattataccactcttggtataatatgtgaatgttgtataaagcagcagtttcactaccattgtatcgctgttggggtgtacaagtgttttggggatttgggtggggggaagaattgatattaaaagggaagttgcagcagcagtacagaaagttcacatctatccttcgcccggtttcactcgttaacatttttcatataactttgcaactaagagattaacatgggcacttttctgtttggtaaactccagactagattgaatttcatctgtttttgcaccaatgtccctttcctgttgcaggattcagtcctggattccatattgcattaggggtcatacagattttaaagcttttttgctttttaaaaaatagactttatttattagagcagttttagggtcacagcaaaatggagcggaaagaatagagagttcccacataccccaggccctcaygtgcacacagatgcccaagcttttttattttacttatatgagtgcactatgaatatgttcttaatgtagagagtcagtcaagtcagccatgtgttaagaataaaaaaggaaaaacccttttccccattaccttccaactctcctttctcagatgtaaccactattagcagctgccgatggtggggggctcttttcagcactgtcactgtatatacttttacatagacattcatacagttgtttyattattttttgcatgacttcatcctatacattattgcaaatttgttaaacttaatttgtcttagaaatcattgcacgtgaatacttttcacattgtctttaagaatctctagaagacatgcctataaaacaatgcctttcagctcttaacaggatgaagtaagtttgtccttagattccacccgggagagctagctgagaaagtgcagtaagtggaagaaaaagacaaccacagattagkgtgttttggtcccattttcattcaaagaaactttctctgtatgtgttgctatatgcatagaagaaagccagtttggacaccaaactctttaacagtgcaatatctttaggggatgtgactgtgggagattttaccatttcacagagtttgacttaaaaaagagaatatgttgcaggtagtgactattgggctggcggtgcagctggtaaaggaatttaccaagacagctgtaggtaaagaaaggcagatttattggaggaagtatgaaaatatgttgcaagattgcaacaggcagcacagcagagaaggatctgtctgcaaagaggcaagggctggtgggaggttttatagggtggtgctggaggaggggctgtgaggtcattacgtcctggggttgtttgtgattagccatctctcgagcagttgttcattgttcttccccacctggggccgtcccccacctggggcccctttctcctcgttactgtggagtcgggactccacagaatattatgtctgtgagacaacaaaagtaaaagatcagcagagtcctggatgagtaccctaaacacatcactgcgtttgttttatgttctctcctgagaacttccagaagcttccagagctggtttycccatgaagatcaggctgctctgcttcccccgacaggtacagagtgagatcccaggctcgcccatctttctcatgaagctggcccagcacgcccgtcacctggaagttcagatcctcgctgaccagtatgggaatgctgtgtctctgtttggtcgcgactgctccatccagcggcggcatcagaagatcgtkgaggaagcaccggccaccatcgccccgctggccatattcgagttcatggagcaggtacacttctcagagcccagggggcagcttcagagagagccgtctcagctcagagtcaggaagaactttctacggtcagtgtggctgaatggtggcatgggtgcctaacaagagggatgagggcccattccagaggtgatttcagcatcacacaggtttattggattagccggtctgtgaactccccaaatatttcttttcttttttgagacagagtctcactgtgttgcccacgctggagtgcagtggtgcgatgatagttcacagcagcctgtaactcctgggctcaagtgatcctcccacctcagcctcccaagtagctgggactacaggaacctgtcaccatgtctggctaattttaaaaaaaaatttttgtagagacagagtcttgctatgttgcccaggctggccttgaacttctggcctcaagtgatcctcccgccttggcctccttaagcgctagggtgataggcatgagccaccacacctggccagtcccaaaatatttcacatgtagcaggtgctcagtctgcatttggtgaaggaactgatagtcaccatttacagttccctgaaaagacctctggaacccccttggcctctttctgtttcttcacagtgtgccrtccgcctggccaagaccgtgggctatgtgagtgcagggacagtggaatacctctatagtcaggatggcagcttccacttcttggagctgaatcctcgcttgcaggtggaacatccctgcacagaaatgattgctgaygttaatctgccggccgcccagctacaggtgagaaaatgggcttggggccctgggacttctctgccctgggtcaggggtccatgtgctgctcccattagtccatcycgcccatctcttggccgactgtcccaggggaatgactggccaaagagcactttgagaaatctgtaaaagctatagttctccctgggaaaatatcttttatacaatttcaggacattcatagacctagagraatgtttcttaaccttgttatcattatcactccctgcaaggatcctttggacacattttatatcctaatccctgtcttgtgaaattttaatatcacaaatataccacatacctgtttggatattgtagatatatctgtgctttattcatgaaaagagtgagattttcttcactcccaagaacaaatatttgtctcttcagaggcaatatcatccctgttaagaatatgtgatccagagttgtaacctcttgggttaaagggaactctaaattttttttttatttttaattttgatgggtatatagtaagtctgtatatttatagggtgcaagagatttttgtttttgtttttgtttttttgagacggagtcttgctctgttgcccaggctggagtgcagtggcgcgatctcggctcactgcagcctccgcctcccaggcatacaatgtgtaataatcacatcagggtaaatgggtatccatccccctccagcgtttatcctttctttgtgttatggtgttatgaatattccaattatactcttttagttaattttaaaatgtacaataaattattgttgactgtagtcaccctgttgtactatatcaaatagcaggccgtattcattctcttaatcactacatttttgcgcccattaatcatcctcgctttccatgcccctacctcttcctttccagcctctggtaaccatcattctactctctgtgtctgtgagttccattgttttaatttttagctcccacaaatgagtgagaacatgcaaagtttgtttttctctgcctggtttatttcatttaacataatgttctccagttccatccacgttgttgcaaatcatggtctcattcttttttatgtctgaatagtactccattgtgtgtatgtaccacattttctttttcctttttcttttcttttttttttttttttgagatgcagtctcgctctgttgcccaggctggagtgtagtggtgcaatctcggctcactgcaacctccacctcttgggttcaagcaattatcctgcctcagcctccctagtagttgggattacaggtgcacactactatgcccagctaatttttgcatttttagtagagatggggtttcaccatattggccaggctggtctcaaactcctgacctcagatgatctgcccacctcaacttcccaaagtgctaggattacaggcatgagccactgcacctggcctgtaccacaytttctttatccaatcatctgttgatggacatttaggttgattccaaatcttggctattgtgaatagtgctacaataaacatgggagtacagatactcttcgatatactgatttcctttcttttgagtatatatttagcagtaggattgctagattggtagttctacttttagttttttaaggaacctccatattgtcctccatagtggttgtactaattttcagtcctaccaacagtgtatgaggggtcccttttctccacgtccttgctagcacttctttttctgttttctttttcctttcctttttttttttttttttttttttttgagagtgagtcttgctctgttgcccaggctggagtacagtggtgcgatcttggctcacagcaacctctgcctcacggttcgaacaattctcctgcctcagcctcctgagtagctgggactacaggcgtgtgccacgacgcccagctaattttttgtgtatttagtagagatggggtttcaccgtgttagccaggatagtcttgatctcctgacctcgtgatctacccacctcagcctcccaaagtgctgggattacaagcttgagccaccgcgcccagctgctagtatttcttattgcctgtcttttggataaaagccattttaactggagtgagacaatgtctcattgtggttttgatttgcatttctctgatgatcagtgatgttgggtgccttttcctatgcctgtttgccattcgtatgtcttcttttgggaaatgtctattcagatcttttgtctgtttttaattggattcatgagacttttttcctactcagttgttttagcttcttttttgtttttgagccagggccttgctctgttgcccaggcaggaatgcagtggcatgatcatggctcactgcagtcttgacctcctgggctcaagcgattctcccacatcaacctcctgagtagctgagactacaagtgtgcaacaccatgcccagctaactttttaaaattttttgtacagataaggtctcactatgttgtctaggctggtctcaaactcttgggttcaagcagccctcccacctcagcctcccaaagagctggtgttacaggcatgagtcaccatgctcatccttgagcttcttatgtattctggttattaatccctcgtcaggtggctagtttacaaatgttttctcccatgctgtggattgtctcttccctttgttgattgtttcctttgctgtgcagaagtttcttaacttgatgtgatcccatttgtcctttttttgctttagttgtctgtgcctttggggtattactcaataaatttttgcccagactgatgttcctgagagttcccccaatgttttcttctagtagtttcataatttcaggtcttagatttaagtctttagtctattttgatttgaagaatttgattcttcatttatgattctgcatatggatatccagttttcccagcaccatttatcgaagagactttttccccattgcatgttcttcgcaagtctgtcaaaaatcagttcactgtagatgtatggatttgtttctggattctctattctgtcccattgatctatgtgtttgtttttatgtcagtaccaccctgttttggttactgtagctctgtaatataactcatagtcaggtaattcaattcctccagtgtttgttcttttttttcaggatggtattggctattctgggtcttttgtgtttccatataaactttaggatttttttttctatttctgtgaagaatgtcattggtattttggtagggattgcactgaatctatagattgctttgggtaatatagccattttaacaatactgattcttccaaaccatgaacatggaatatctttccatttttgtgtgtcctcttcaatttctcacatcagtgttttatgctttttattatagagacctttcacttctttggttaagtttattccagggattttattttgtttgtagctatcataaatggaattactttcttgatttttttttccagaccattcgctcttggcatatagaaatgctactgatttttatatgttgattttgtatcctgtagatttactgaatttgtcaattcgaattgtttttttggtggattctttaggtttatccaattttaagattatatcatctgtaaacaaggataattggacttcttcctttccaatttggatgtcctttatttcttctctaaattgttttcattgttttcttccttccttccttctttcttcccataatggggtctcattacgttgcccaggctggtctccctcccttcctctttttcttccttcagcagaattttttaaaaagttttctttatttttttttcagtttgaaagatttcaaaaaagttgcaagaatgatacaattaatacccatacgccctgcatatagatccatcagttgccacatttgctttgtctctcttctgtctgtttgtataattttagggggctcaatcttttttttttttctttgagatggagtctcgccctttcacccaggctggagtgcagtggtgcgatsttggctcactgcaacctccacctcccaggttcaagcgattctcctgcctcagcctcccgagtagctgggattataggtgcctgccaccacacccagctaatttttatatttttagtagagacggggcttcaccatgttggccaggctggtctcgaactcctgacctcaactgatcagcccacctcggcctcccaaaatgctgggattacaggtatgcaccactgtgcccggccgtgggctcaatcttttgagcaatggtttgagtgaaccttcgtaacatatggcctctgaatacttcattctaaaggcctcctagaacaagagcattccggtccaatgccctagtgcaattatgacacttgagaaatagagcattgataccacatctatatctaatatataccattcacattaaatattttccctgttgttccaataatgtctttttgtagctgttttttgtctcttaaatccaggatccaacccaacccagggtgacacattccattttattttcatgtgtctttaatctctttaatctgaaagcatttcgtagtcttttttcatccttgacattggcattaaaatttttttttttttttttggtgatggagtctcgctctgtcactcaggctggaatgcagtggtgcaatcacgactcactacagattcaacctcccaggctcaagtgatcctcccacctcagcctcctgagtagctgggaccacaggtgcaagtcaccatgcctggctaatgtttttttaattttttctgtagagatcgggtctcattatgttgcccaggctggtctccaactcctaggctcaagcgatctgcctgcttcagcctcccaaagttctgggattacaggcmtggacactggcatttttgaggagctcaggcagaatgtccctcattggatttctctgattgtttcttcctggttcgattcctgctacacattttggcagaatactacacaggtgttgtgtccttaatacatctcatcatgaagcctgttaaatctgatcatttggttaagctggttccataattgtctactttttacccattcttcatgtccagtttccccttcgggtgccctttacaaaaacttcctttaactctgcagccaacatggttgcttctcaccttccctagctctaaaartctagtgcttttacttgatgcatgtattttcttgttgtgtgatgttgtttcataaatatttttccttttcccaactgtactatttgctccactgtgaaaagttcatgtcttatggctttttctttctttggctctctggccacagtagagcaccatgttgtctatagagtagtgtctgtatatcctaaatcattgactgaacctccgttgcatctaccactgtgcctggtgttttggggccrtgttctggtaggactgacagtctgtgggttggatctcttgattttagatcgccatgggcgtgccactgcaccggctgaaggatatccggcttctgtatggagagtcaccatggggagtgactcccatttcttttgaaaccccctcaaaccctcccctcgcccgaggccacgtcattgccrccagaatcaccagcgaaaacccagacgaggcaagttatgggggcccctgtgtttccaccatctcagatctcccagcatgtgggggaccctggatgttagcctgggaagagacacccacaagctatccaggcatctcagtttacaaatggggaaactgaggcatgggaagggacatcccatggtttatttgattattggatttattggatttttatttttatttatttttatttttttgagatggagtctcaccctgtcacccaggctggagtgtagtggcgcaatcttggctcactacaacctctgcctcccaggttcaagcgattctcctgcctcagtctcccaagtagttgggattacaggcgcccgccaccacgcctggctaatttttgtatttttagtagagacggggtttcaccatattggccaggctggtctggaactcctgaccttgagtgatccacccgcctcggcctcccaaagtgttgggattacaggcatgagccaccacacctggctggatttactggatttttggattattgccaggctctgggccgagccttcccatgtctcactgctcacttataggacactactgctgctggacatcgtcaccccacattacaggcaaagagcctggggtaacttgcttcctgtctcccacctgggacctgctgagacccatcagtggactccaaaagccatgcctatctttgggacaagcagccaggtttagaaccctagtccttggatttctggccccgtgtgctttttgcyacagtatgaagtctggctcattgtagagagtccctttgtgacttggccttacttgggtcttaaaaaacaaaccaactggcatcccttacagtttacatgcataccgaccgttgattgtcacaggactcatcaatctactacaacttaattgcttaattattaccctcaggaaactgggggtaagagagggtacacctccaccccttttaattaaataattttaagctagggtagctgtattcatttagggttcttggctgtgaaccaaacaccaactctggtggacaagcaaaaggggaattttttggagggatgatggctcgttcccaggttcctaggaggatggaggaccaggtatggtaacagcccaggcacttgggtcgctccatctctcacttctacatacctctycccaaatccttcatcccttagttcaggagccctaatcccagtgagaggtgccatgtccacccactcttaccaaaattgtacttagagggagacgggccgttctcccagagggaatcaggtgtgtgttggcagcagcctggccgatggggtgaggaaaagggggatggagggagggagggaggaaggggtaggaaaggaaggagggaagaggggagtgaggaaggacgaagggagagagggaaggagggagggaaggaggaaggaaggagagaagaaaggaaggaaataccaacgaaatggcctcttccctagcagcaagggccctgcccaggatgccctggatttcttcacctgcagaggttttcattatccagaattggaaatctaacctgtcttcacttctatttaaactttttattttcgaaatgtcaagcatataaagtcagaatgtcccttcactcagctccatcaatcatcaatgttcgcccatttaacacctgcactaccatctctgtcccaactcgcttattttatttatttatttatttatttatttatttatttatttatttatttgagacaggttcttgctctgtcacccaggcgggagtgcagtggcgtagtcatgcctcactgcagcctaatctcctgggctcaagagatccttctgcctcagccccacaagtagctgggactacaggtgtgtgccaccacacctggctaatattttaattttttgtagagatggggtctcctgatgttactctggctggttttgaactcctgggctcaagtgatcctcctacctctgcctcccaaagtgctgggattacagacatgagccactgcgactgaaccaacttcgttatttttttacagttaaaaaaaataagaattataggcattgaggagctcatatgggtacacccatgaatagatacatccatacctgtaacaagcgatatcagtgttctattgactaccctaagcttttggtcagcgtaggggttcttgggttttcccaggactgaattctgatgaaaatatatctggagtaatgatttcttccattttgcattttctgtccggactccagggttttaagccgagctccgggactgtccaggaactgaatttccggagcagcaagaacgtgtggggttacttcagcgtggccgctactggaggcctgcacgagtttgcggattcccaatttgggcactgcttctcctggggagagaaccgggaagaggccatttcgtcagtatctccttccttccttccttccttccttccttccttccttccttccttccttccttccttccttccctctctcccttcttcccctcttccttccctctttctcctcccttcctttcttcttccctccctctcagcctttctccttttttccttccttcccttccattgccttcctgccttcctttcttccttccttcctcccctcttctgccctcccctccccttccatcccttcccctcccttccttcctcccktccttyctcctccccttcccttctttcctcccttcctccctccttccttcttttcctgacttctctgctttcctccccctccctttcttcctccttctttccttccttccttctttccctcccttcccacttcctccttttcccaattccttcctttaagaaatgaaacggtcccctggggcttcagatacagtagcatttcaggagaccaagaaaagtaaatcacagggtaggccccattttaaataccctgtgcttgaagttcaagatcaaagcctgccctttttttcctttattgaagatccacaaagtaaaataagtgcaccaaggtcatttggtcttgagcttataagagttctagcttgaaggagatctaaagattgttctaggagatacccaaagtgtaaaaggtgctaagtaccatagctgaagaaagggggagggaaactcctttacatttaaaccttatcagtagttccctaatgggttgtatttcacaccgaagactaaattttaaggagtgtgtcctgctgtgaaccacccaccacyctgaggcctgtgacagcagccccatgtccccagctcagccaagtcctcccatacttgtgatagtttctgcagagctgagaagcccacattgacagagggacccccaaattctgacacaccatctccgacacttctcctggcttgacatgggtgtggaaaggtataaaactagtttactttgtaattaaatgtttttgtgtgggtaactgcccttcggagtgaaaaaatcccaaaggccttagcattaaaatctgacgtggggcacttagccacgaattaaattgagttgggcagttttgatgatcaggttttctttgccagcttagaataattaattttaatcatgcttagtgaaaaatcaagatccttgaagtttatggaagattgcagcaaaaagggcttacttaataggagtaggcggaagacaggtcagccagcccagacccctccgagtgaagtgacctgtggcttgtcacatgctacgagtggaccaaccgcaacttcaacagaactcacaggcagaaattccagcttttcttattgctgttagtgagagtccagtagggggatcaactgtcctcgttttcctggcaccggtttctcaggttgaaggacttctcagtgctaaaatggggaccrccccaaggaaactgggacaagtcactcacccgtgagaccagcgggttaactctcatacccagcttccagacccacagctgacttttcatggcctatggatacccttgtatgaccttactgggtcttcattttctcacccccaaaatggggtcatcagtgtccttccccgttacctgctgacagcacacaggatgctgcaagacatgaaagcttactcggccaggcacagtggctcatgcctgtaatcccagcactttgrgaggccaaggcgggcagatcacttgaagccaggagttcaagaccagcctggccaacatgacgaaaccccgtgtctactaaaaatactgaaattagccgggcatcctggtggccatctgtaatcccagctactcgggaggctgaggcaggagaattgcttgaacctgggagatggaggttgcagtgagctgagatcgtgccatttcactccagcctgggcaacaagagtgaagctccgtctcaaaaaaacaaaaaaaagaaaaaaagaaagctttctctcccagaagaagaggtgttcagatacctgcccacactcaccatgaattcatagggctcagcttcccgagtagctgggactataggcgcgtcccaccacgcccggctagttttgtatttttagtagagacgggatttctccatgttggtcaggctggtctcgaactcctgacctcaagtgatccacccgccttggcctcacaaagtgttgggattacaggcgtgagccactgcacctggcctgaggtttagctatttgaactggtgctcttggagatttggagtctgtgtgttggggagaggcagccatggggcccaccaggcccctgagccgggtgacagtgccgtccatctgcaggtgcaccccacacacaccaggcagagcagctgtgtggaaggtgagagggtggcaccagctctggggacaggagatttgaataggtcaagggagagacagaggcggtgaccgattttccctttgttttttttttcttcttttaagagatagcgtctcactgtgttgcccaggctggagtgcaatggtgtgatcatagctcactgcagcctcaaactcctgggctcaagcgatcctccccctttagcctcctgagtagctgggactacagtcacataccatcacgcttggctgattttaaaatttttgtagagatggcgtctcattatgttgcccaggctggtcttgaactcatgcctcaagcaatcctcccgcctcagactcccaaagcagtgggattacaggcatgaaccaccatgcctggctggttctttctctactaatcattaactattatagtcaataattataacaataataactaatcacrttcattgtagttaacatttattgatcagtgaccatgtgcattacatggattgtctcatttcaattctcgaacaccctcatgaagtcagggctatttccccattttccatatgaggaaactgaggcccagagttctcaagtcacttggccaagattagccaggcagtaaaccctggygctgattcaatgcactggctgtgtcagtcagagccctctcttaactcttctttttttttttttttggagacagagtcttgctctgtcgcccagcctggagtgcagtggtgtgatctcagctccctgcaacctctgcctcccagattcaagtgattctcctgcctcagcctcctgagtagctgagattacaggcgtcctccaccatgctgagctaagttttgtatttttggtagagatggggtttcgccatgttggccaggctggtcttgaactcctgacctcaagtaatacacctacctcagcctcccaaagtgctgggattacaggcgtgagccaccacacccggccactcctgtgcttttccagttctctgaatcacatcattgcagcaactctgttgatgtatgcatgaatttggaaaatgatccatgtgcctttcccttcaaggaacatggtggtggctttgaaggaactgtccatccgaggygactttaggactaccgtggaatacctcattaacctcctggagaccgagagcttccagaacaacgacatcgacaccgggtggttggactacctcattgctgagaaagtgcaggtagggagtgagctgcctgtgtctcccctctggatggccgagacctcggcttcctgaggatactgaagtgcattttctcctaggcggagaaaccggatatcatgcttggggtggtatgcggggccttgaacgtggccgatgcgatgttcagaacgtgcatgacagatttcttacactccctggaaaggtaggggctgtggcagttcccttctgcttttgtgatatgtgttagyggcttaggaggctgaatctgtctcctttatttgtgtggccagttagtcaccaggcaattggtgagtctctcctccggtcttgcctctgggaaattcctctacagatcaacctaggctacccttgaagaggctgtgggttagggaatgggattctcgaggccagggtggcagtcagtgaacaggctgttgtgtayggatccatgctgacttgtgtaaggtacatcataatagtcaggagttctgagttcaaggaggtggatttgggaagcaaagcggcttaaaggtcatctctacaagcgggtgcattcccagaccctcaccagaatcagagggtcatcatgaaatggaccagaatggaaagcaaccaggcgatctctgttaggataggccggggtttctcagcctcagcaccattaacattttgtgctggatgctttttttttgtttgggaacctgtcccgtgcatcataggatgttagcagcattcctggcctctacccactaaatgccaggagcagcccttccctctgagtcatgacaatcaaatatatctccagacattgcccaatgtcccagggttaggagtagaataatcacccccagttgagaactgctgcaagaggcaaaggaactatcaaaaagaaaataaaaggataawcttttttttttttgagacagagtcttgctctgtcatccaggctatcacccaggctagagtgcagtggtatgatcacagctcactgcagcctggacttcctgggctccagtgatctgcccacctcagcctcccaagtagttgggaccaccggtgcatgccatcatgcctggccaatttttttaactttttgcatagatggggtctcactatgttgccccccaggctggtctcaaactcatggcctcaagcaatcctcctgcctcaactctgaaagtgctgagattataggcgtgagccactgtgcctggtaagaaatgtttttagtgtttggttatgcttttgaacggtagtagaatcacagyccctgctctggtttctttcataagccgaaggcaggatcccatatgtgaaatttttccaagagaccgttatggattttgctcctgaaaagcctttgtaagatttcaaatccctcagcaagtgctgattccttaagttctaagcaatatcaggctgctcagggtgattcaggttctgtgcgtgacttttaatcagatttagcctttttttttttttttttgagacatagtctcgctctgtcacacaggctggagtgcaatggtgtgatctcagctcactgcaacctccgcctcctgcattcaagcaattcttgtgcctcagcctcccgagtagctgggatgacagctgcatgccaccacgcccggctaatttttgtatttttagtagagatggggttttgccatgttggccaggctggtctcgaactcttggcctcaagtgatgtgcctgcctcagcctcccaaggtgcagggattacaggcgtgagccattgcgcccagcccaggcttagcatttttagtgcagtcaggtttgctgatgcagagagttgcgtaatttttttaaatgcaagggatggctgtggagttctcagtccctcccaaggstgaccacaaccctgtcttttctttcaggggccaggtcctcccagcggattcactactgaacctcgtagatgtggaattaatttacggaggtgttaagtacattctcaaggtaaatgcccccgtgcytctccgatgtctccaacactctgcaagcttcagggagtttctttcttccatgaaccatccctggagtggatttgctcatgcttgggtttgagctcttgtgttcctcgggaatccccatgtagtccgtgaccttgacacctaaacactttggcttttagaacatgtagggctgtgcattctgcagagggcacaatggagcgtggataagtttcctgtagctgcggtaacaaggtaccacaaactggtttaaaccaacaaaaatktattgtktcccagttctggaagccaagtctaaaatcgaggtgttggcgggccgtggtctctctgaaggcgctggggcaggatctgttccgagcctccccagcttctggtgctgctggcagtccctggtgatttttggcttgtggatgccttgccccagtctctgtctctgttttttkttgttgttgttgttgttgttgttktttcaaacggagcctcactctgtcacccaggctggagtgcagtggctcaaccttggctcactgcaacctccatctcccaggttcaagcaattcttctgtctcagcctcctgagtagccgagattataggcatatgccaccatgcctggctaatttttgtatttttagtagaaatgggatttcaccatgttgcctaggctggtcttgaactcctgagctcaagtgatctgccctgccttggcctcccaaagtgctgggattacagkcatgagccaccccccggcctctgcctctgtgtgtgtgtgtgtgtgtgtgtgtgtgtgtgtgtgtgtgtgtgtgtgtgtgtgtgtgtgtgtgtgtgtgtgtgtgtgtgttcacattatcttccatgactgtgtctttgtgtctcttctcttgtaagaacaccagtcacattggatttagcgtccaccctaatccagtatgatttcatcttaattacatctgcagagacctcattccaaataaggtcacattccaaggttccaggaaggccatgaattttggaggatattattcaacccctatagaatgtgagctgggcctttgctgagacagaatagtgggcccgggtctgtttccaggggctctgaggctggttttgttctctgtctctgcaccacgtgtagattwctggcrtcttccctggtttactactggagtccctggggcttattccggttgctctcctctgtcagaagtgcctagttgccctttgtgggccatccaaggtcaattcaacagtgtcagaaatgtctctgagatgcacaggtagggggtgaggcttggtgtcctagccatggtgttctgggcccagggtccttgttggggtgagccggctgtggcatcagtgccccgggttccaatgcaatggcaggaggctgtgtcccctgtaagcccaggcctgcccagtacttcccagcctcacattgtcaggagggaaaagaggacagagtttgagtctgcttatgagacagaatttttgttttctttaattagtactttctatttaatattgatgagcatgagtagaactcacaactttggagatttgggggctttagttcaactaaacctgtgtgtcattgatcagggtatgctttcacaatcatcctcctttgcccctaatgcctcttggctacctttggggacctagctgcccccaacttgattttaaatgtcacatatgcacaatgyagaaaatttcaaaatttcaagcgagcataaaaaatcaggaaaacaaatccatcatgtgctaatgcctagaggtaatcctggtaaacattttagcaaatctttgttatatatttttttccttttgcattaattttacaaagttgagatcatggtgcaaatgcagttttacagctttgatatgatcatggcataaagttttccatgttattaacaagttttttttttaacacgagtctaaactcatgtctgtggcactgtctccctgaacttttaatagtgatgggaacattccctatcttctgtgtccaagatgctgcccttatgtggtgactgagagcttgaaagtggccagtgtgactgaggaactgaattttacattttatttcattttgatcartttaaatagctgtgtgtggttaggggtcaccgtatcagacagggcagatctaaagtgttccattgcaaggttgttggcytgctaattttgttctaatttttgttgttattacaaataatgctgcaatacacattcctctatttcttgctgccttgtgtcataaactgtgaattttataggttgaaggccctttagggtgtgtgttttctgagagaaaacygaactgaagtaccagatggggcaggcgctcttcctggagggagatgtagtgctggggccagggcttggctgtgtctctctcacgtgtcccaaagctcttgtgtgctcctgggcagagctgggtctgggaagcagagccctagtccatgtccaggtgtcttagtccatttgggctactgtcgtaaaataccaaagactgagtggcttctaaaccacacactgratttctcacaattctctaggctgggaaggtcaatatcaagatactggcagatttggtatctactgaggacccacctttcgtttcatagatgctgtcctttygctatgtccttagatgtcagaaatgggccacagagctctacaggggatcttttataagggcactaatctcttttacaagggccccaccttcatgatctcatcacctcccaaaggctccacctcctaaagccatcacattaggggttgggatttcaacttatgaattttgcggggacacaaacgtttagtccattgcacctggctgctggtggagtctccagggctgcctcacacagagtgagagctggagacaggaatcagaagggagtctctagccccagaggacatgcagttgccaacacggcttgacagggactatataagcggccattagcctacccacagggcaggtgtggctcgctactccaggcctcccccagccccatcagcagctgctcccttggcaggaattgtgagggctgggtccgagagacgggggtgttcatcttggccctctgtggtggacaaccagctcttgtttgttgttagcggggcccagcagtgctctgggagcacatcctgaacccaggcggtgacaaggggcttgtccccacaggtggcccggcagtctctgaccrtgttcgttctcatcatgaatggctgccacatcgagattgatgcccaccggctgaatgatggggggctcctgctctcctacaatgggaacagctacaccacctacatgaaggaagaggttgacaggtgcgtgggggtgcgagtcccactgtgggctgggcatgcacagctctctgtcctaggcatggaaaacacagcrctggcctgtgtgcaggtccaagggtcttagagaaggtgcctttcyggtaaattctgggggtgtgcagagaagttaatctcttggttggaattctgtgcaactggcagatatttaggggaggatcctaggaggcccttttctagtaacctggttggtggggattcagagctgaacgggacatgactcccagctctgtggcctgcgaggtgtgtgaycaggtgcctgctgcctgtgcatctgggctcyggcatccacccagttagtgcggcagtgacctactaagctcctccgtaccaggcgctgtgctgggtgttgggatagcattctgggtgtgactcgtggagcttccagcccattcgggaagatgacacactgaacaaacagatagtggcaggaaagggtgtcgtgtacctgacgggtaacacacaagatgccctggaagctcttagcacaggggcttgtgagatagtgagataggccccaaagatgccccgcctccagtgtgtctgatcaccccgagatcacgcaatgaaacagaccccagccaaggtgatgaaaggggaggggatgtctgaaaagctccagttagagagtggagactctcttctcaatcctcaatgttttggaagaaggaagactaggtttatgccagagtaatattttgttatctccttttttttctttttgagagagggtctcgctctgtcacccaggcaggagtgcagtggcaccatcatgactcactgcagcctcaacttccctgggctccgagatgatccccccacctcagtcccccaagttgctgggactacgggcaygtgccaccacgcctggctaatttttgtattttttgtagagacggggttttgccatgttgctcaggctggtcttgaacttctggactcaagcagttggccagccttggcctcccaaagtgctgggattgcagtcatgagccactgcaccctgcctgttatctcttttttaacccacgttctatctgccaagaatgttcaggattactataggttctactctccccagttcaaaggttaagactttgaatcagtaaatatttgttgaatcatatccactgattgatttttctgtgtcaggccctgttggaagtatgtcagtaaaaggaaccagctttcagccaaaaaagggtcacatcctttttattattttattttattttaaagactggttcttactctgttgcccagcctgggcaagagtgagaccctgatcgcttgagtccagaagtttgagaccagtctgggcaacatggcaaaaccccatctctataaaatacaatgattagccaagtgtggtggcgtgtgcctgtagtcccagcaatttagggggttgtgatgggaggatcacctgaccccagggaggtcaaggcttcagtgaaccatgattgtgccactgcactccagcctgggtgacagagtaattatagctcacaatagcctcaaactcctgggctcaaaggattctcctgcctcagcctcctgagtagctgggactactggcatatgctaccacgcccagctatttttttttttttattttttgtagaggcagggtctcactgtgttgcccaagcttgtcttgaactcctggcctcaagcsatcctcccacctcggcctcccaaagaaagcatcacagccttggccaggcacagtggctcacgtctgtaatcccagcactttgggaggctgaggcgggcggatcatgaggtcaggagatcgagaccatcctggctaacatggtgaaaccccatctttactaaaaatacaaaaaaaaattagctggatgtggtggtgggcgcctgtagtcccagctatgcgggaggctgaggcaggagaatggcgtgaacccgggaggcggagcttgcagtgagccgagatcgcgccactgcactccagcctgggcaacagagcgagactccgtctcaaaaaaaaaaataaaataagaaagcatcacagcctttttgttcacccacctcactctcagtgtctctgagataactatcaactgccaccctttgggaatgtagagggtacactccccctttaggaaggggaaatggtattgaaagccggactagggcttgctgagttggtagtcctcatcagtctccctacccsactcctcctctctcccagttaccgaattaccatcggcaataagacgtgtgtgtttgagaaggagaacgatcctacagtcctgagatccccctcggctgggaagctgacacagtacacagtggaggatgggggccacgttgaggctgggagcagctacgctgagatggaggtgactgcagagccsgccgtggggaatcctgaaccctcaaactcccactcttctggctttgtcccatgtctgaacaaacaggcctacctctccccttgaccactgtctgcaaatttctaagggaatcagtctgtggatttcagccaaatcccctgaagtattcaaagaaaaaaacttcaggctgggcgtggtggttcacgcctgtaatcccagcactttgggaggctgaggcgggcggatcacgaggtcaggagatcaagaccatcctggctaacatggtgaaaccccgtctctactaaaaatacaaaaaattagccgggcatggtggcaggcgcctgtagtcccagctatgcaggaggctgaggcaggaggatggcgtgaaggcaggaggatggcgtgaacccaggaggcggagcttgcagtgagctgagatggcgccactgcactccagcctgagcgacagagaaagactccgtctcaaaaaaaaaaaaaaaaaacttcaaaaaatgcacatctccccaggaatgagtaagaaggttaatgacagagaaactgggtacagagaatatggaaactctctgtactatttacataactgttctataaactgttgtgtaaatcagtttccttgatttctttattttttttttgagacaagtctcagtctgtcacccgggctggagtgtagtggcgtgatcttgtctcactgcaaactccgcctcccaggctcaagtgatcctcccacctcagccttccaagtagttgggattacaggcacgcaccaacatgcctggcttaattttttgtatttttggtagtgacagggtttcgtcatgctgctcaagctggtcaaatacctgagctcaggtgatccacctgctttggcctctgaaagtgctgggattgcaggcatgagccactgcacacagccaagaattgattgataataacaattattgtcaatcaatgattaaatattaaatattgaccccagcaataattgaaaggtgttaagccaacacttgcaaagccataaccatgtggcaggtgctgttctaagcattttactgatctttattttttaaccttcccagcaaatatatgagatgggcacaaatgtgatccccattttataaaaaagctgggcccaggcaggctaagaaactcactggaggtcacacaaagccaggattcaaacccggaaaataacaacaataatagcaatgaaaatacatcaataatagtagctactgcatattgacctgctgcatggcaggatctgcatctcattcaatcctcgtaagagccctaagaggtgaaactgtcattattcctcattttacacttggggaaactgaggctcaaggaggggagccacttctgaagatcacagaggtattggggggggcagttcctgggattctagtccaggcctggctgacttgggtgcccaagctgtgaactgccaagcaagagagatagcacagtcctggctctgcggccgccaccatggtgacaaagctcatgccacgcacgtatccagacattcgggaaaattaaaagggctgatgagcagattcttcatttcacagagtgttccctgagggttttctaagtgcctttaataaaacaaactgttcacaaaatgtttgatttatgcagtacgttttaggaacgtgtatatgaaccactctatgtaatatgatttaacagtatttctaagagaagactccccctttggaaataaacatcagtttccatatctgtaaaatgggcatcataaacacctccttggctggctttgcagattgaatggcacttgcctggcacttagcaggcttccagtaaaggtcacttttccttgtaccttctgcctgaacactacccagggagtcattctggcgcgtccctgggtagtgtcccggcgcgtccctgctccggcatcactagttctgggtggctctgggtgtcaatcccggtgggctctgtactatttcttctttttacgaaataggtgatgaagatgatcatgaccctgaacgttcaggaaagaggccgggtgaagtacatcaagcgtccaggtgccgtgctggaagcaggctgcgtggtggccaggctggagctcgatgacccttctaaagtccacccggtatgtggctccacngcccaagtgctctggctggtgcaggtgcactcgtgacctccactggttcagtgagacaggtggactcaaggctggtagcgcttctccygcctccacctgcagacagagctcgtcgcagcagccaccgtgatggtgcagaaacacaaggaagccgcgccctgctttactcagatccctctctgtggctctccatcctgcttagagcaaaacccaatttctgccagtgacctgcaagaccccaaatgagctagctgttccctgctttcttctctgcctttctcctctgtccctctccccatcacttacttgaatacactggacccctccctcctggcggctgtcctctctgctgtgaaggacctaccccagactttgcagggatcactctcaactcctgggagctttgattccaatgtcttcccctcaatgagggcattcttgaccattgaccaccttttctttttaatagacttaatttttagtatagttttagatgtacagaacagttatgtaagtagtgcagagttcccatattctctgtggccagtttccctgtcattcatttaattatcattcaattaattgttagtattattattattattcatttttttttgagacagactctcgctctgtcgcccaggctggagtgcagtggcgtgatctcgactcactgcaacctctgcctccctggttcaagtgattcttctgcctcagcctcctgagtagctggggattataggtgtgtaccaccataccagctaatttttgtatttttagtagagacagggtttcaccatgttggccatgctggtcttgaactcctgacctcaggtgatccaccctcctcagcctcccaaagtgatgggattacaggtgtgagccactgcacctggcctcaattaattactattgttatcaatttactgttattaatttaactattattgcacgagcatggtccatttgtcatatttaatgaaccaatatcgatatattaggtattattgtttaagaataataattaactttaaaatttaactattattgcaataatatggtccatttgtcacatttaatgaaccaatattggtacattattgttcactcagatttctttagttcattttttaaaaattgtggttaaatacacataacaaaatttaccatcttagccatttttaaatgttctcttgagcagtattaaatccattcacattgttgcacarccatcaccatcatccatctccagcacttgcaaaactgaaacttgacactcgttaaatggtaactcctgagtccctcctccctccagcccctggcaaccattgttctgctttctgtctatcaattcaactcctctaggtgcctcatataggtggaatctatatagtatctggccttttgtgactagcttatttcatttagcgtaacgtctccaagtttcatccatctgatagcatgtggcagaatttccctgttttttaaggctgcataatattcccttgtaggggtgaatcacattttgtttatccacccatccactgatggacacttggattgtttctacctgttggctactgtgaataaggcagctatgaacatgagtgtacgattttcttagtttttacctattgtccrggatcccatccaggttagcacattgcatatagttgtcaggtctctttcaaccgccctttaaaaaattgtgctcacctccacccacgtgcaaacacacaccrtacctcacaaagatgatctcactgattgtcttgttgctttattatttggcctccaggagactggaaacaccgtgagaacagggccttttggctttcttgctcgctgctggggccccagtgccaaaaacagggcctagtacatcagaggtgctctgtaaatattggttgttggatgaacgtgtagcaggcaggtgccgggggcgtccccctgtcctcaggaccaccagggggtgcaccagagtgtctgtcatgtgaccctgagctcaggctcttgggggcacctccaatttagattcctcttaatttgtcaagctstgtcattaccgatgagtccctgaggtcaaggactactttcgatgtccactgttgtgatcctggggcttagcacagtgctcggagcatagtgggtgctcagaaataacaagtcttgatgaatgaatgaatgtttacaccctcctaagcaagactctaaaataattagtacatctgtccagtaaaaaaaaaatttaaaaatatcacatggtctcttttctccagagtattctattaattgtatttgttttctttttwaaaaaaattataattattatgggtacataataggtgtacatgtttatgggggtacatgtgatcttttggtataggcataccgtctaataatcaaatcagggtgattggggtatctattacctcaagcatttttcatttctttgcrctaggaacattccagttctactcttttggttagtttaaaatgtacagtcgattttaattgactgtagagtcaccctgttgtgctatcaatactatatctttttttttttttttttttgagatggagttttgctcttgtcgcccaggctggagtgcagtggcgtgatctcagctcactgcaacctctacctccagggttcaagcaattctcgtgcctcagcctcctgagtagctgggacttaaggcacctgccactatgcccagctaatttttgtatttttagtagagatggggtttcaccatgttggccaggctgatctcgaactcctgacctcaggtgatccgcccacctcagcctcccaaagtgctgggattacaggtgtgagccaccatgtccagcctcaatactagatcttattcattctatctaactggatttttgtacccgttaaccatccccactcccaccagccccactacccttcccagaccctggcagccatcactctacattctatttccatgagtttatttgttttaattttcagctcccacatatgagtgagaacatgctaaatttgtctttctgcccagcttatttcacttaatgtaatatcctccagttccatccatgttgctgcacatgactgttgttacaattcttttcattagtctctttctctctttttttgagacagagtctcactctgtcacccaggctggtgtgcagtggcacaatctcagctcactgcaacctccacttcctgggttcaagcaattctcctgcctcagactcccgggtagcaagtacctgggaccacaggtttgtgcgaccatgcctgactaatttttgtatttttagtagtgatggggtttcactaggttggccaggctgatcttgacctcctggcctcaagcgatccgtccaccttggcctcccaaaatgctgggattacaagggtgagccactgtgcctggcatcactagtctctttagggagttcccaaagctaggaatagactgggcctttttggatcagtgggcaggtctgggtacctgcactgtgattcctttcagcacacatttcctgtgctgggttaatgaggcagggcctgcccacccattccctgcagcctcacataaatgcttgtgagacagactgggagatcgagtracttcacttggtgagtgtagttagaagaccgcccttggccctgggctgtggggacccacatggagaagctatgatcagattgtgtaggggaaaaccctcaagtcagctttttttttttttgagacagaatttcactccattacccaggctggagtgcaatggcacaatcttggctcactgcaacctctgcctcccaggttcaactgattctcctgcctcagcctctggagtagctcggattacaggcacgcgccaccatgactggctaatttttgtgtgtatttttagtagagatggggtttcaccatgttggccaggctggtctcgaactcttgacctcagttcatcctcccacctcggactcccaaagtgctgggattatggtcatgagccaccgtgcccggccaagtcatctcttaaaaggggagaaaagcctgcagggctaggggtggggatgggtgtgggtggaggggtagagggtgggcaggaaacrgagtgttctctgctgggagaacagcaccccagcactgtgcgtcatgcacrgtaggtatttgtagaatgaatgagtagacgaatgagcacatttagtctgtgttgccctctagggagctttttatttttccatgtgtttacctaagactgaatttttatgatttacaaaaatcagatgcatttgtatgagatgttcataaattttcatcctactgtgaggtgtttaactttgggattcaatagagaatgaaaataaatacagaacatgagatttgttgattataaagcaaaacaacaacaacaacaaacagatcggccgggcgcagtggctcacccctgtaatcccagcactttgggaggccaaggcgggcagatcatgaggtcaagagatcaagaccatcctggccaacatggtgaaaacctgtctatactaaaaatacaaaaattagctgggcgtggtggcctgcgcctgtagtcccagctactcgggagactgaggcaggagaattgcttgaacccgggaggcagaggttgcagtgagccgaggtcatgccactgcagtccagcctggggacaatgcgagtgtctcaaaaaaaaaaaaaaaaaaacagatctcaccgccaccccacaaaactgtctggggtgtgaaactgtgtactgggccatttgcaaaaggaatggtttggaaaacccacattggggtgtgagtttggccattttaactttccagttcattgtctttgattttttcctcagacctcatcctcacttgattacggaagccggcagatctgtcctgcctcccattctgcccggtcccatttggaattcccagagttttcctgacctgtcgttcttgtggtgtctcatcaggctgaaccrttcacaggagaactccctgcccagcagacactgcccatcctcggagagaaactgcaccaggtcttccacagcgtcctggaaaacctcaccaaygtcatgagtggcttttgtctgccagagcccgtttttagcataaaggtaaagtcacctatgagcgcaggcgtgtagaccagtgcggagggtcagaagatctaccccgtgacagcagaggtcattattgagtaagaaatgagaaaatggtcggtcctctgttgkttttattttatttattttattttttcagacaaggtctcactctgtcacccagactcactgcagcctcgacctcctgggctcaagagatcctaccacctcagcctcccacgtagctgggactataggtgcaccccaccacgcccggctaattttttgtatttttgtagagatggcattttgccatgttccccacgctggtcttgaactcttgggctcaagtgatccatccgcctgggcctcccaaagtgctgggattacaggcctgagccaccgcacccagcccctcggttgtgtttatgaaggacctgtcctcagggaattcctcaattcaattgtaaacattggcctgactttttctccttgatcgtaaactgggcttgtagcagttcagctcaagactgagaatactccagtaggacattaaggaaggagtcagtgggggtcaccctgcttaaggagatgacagacaaggcactttgtttgaaacacacctctgttcgtcattcacccttgctgggtctcatctgctcactcagtagagaaacaagaagttctctgatttgcagacctccttgaaagacccatgatgctcatagcagtgactaagcatcacactgtgtgctgtaccgggtccgtctcaggagagcaaatcatgatggtgatgacgataataaccgccaacccttagcaagtatgtaccatgtgtcacccccctttgtttttgagagggagccttgctctgtcacccacaccaaagtgtggtggcacgatcttgtctcactgtaacctctgcctcccaggttcaagcgattctcctgcctcagcctcccgagtagctgggattacaggcgtgtgccaccatacccagctaatttttgtattttttagtagagacggggttctaccgtgttggccaggctggtcttgaactcctgacctcaggtgatccacccaccttggcctcccaaagtactgggattacaggcgtgagccaccgtgcccgctgtgtcaccttctaactacttaaaagttcaatcatttcatcctcccagcaaccgataaggtaggaactcttatttccacttacagttgaggcaactgagggacacagagactaagagacttgctgtgcttcatacatgaggaggcaaagatgagatctgaaccatggccatcaggattctgactctgtgctcttcgcccccacgttatgctgcctgatgattattaccaccattgcaacattttttttttttttttggagacagggtcttgctctgtctcccaggctggagtacagtgggggaaacactgctcactacaacctcgacctctgggttcaagcaatcatcccacttcagccttccaagtagctggggttacaggtgcctgccaccacacccagctaattttttgtagagacggggtctcgccatgttgcccaggctggtctcgaacttctgggctcaagtgatcctcccgccttggcctcccaaagtgttcagattacaggcatcagccaccgcaccccacaataattgcaacttttattagttggggcacttcgcagtttatgcatcagttcactttgaaacctcacaaccacactaggatgttggccccactatcatcgtcatccaaagaccatcagcattggctactgagacaccccggaaacagcatagggcagcagttcagagtctcaggagctgaatagcctgggtttgcttcttactagctgagtgactttggttaacttaactaacctctctgtgtttcagttgcctcaattgcaaaatggacaaaatcattagacttcctttatatggttgcttttagggatcaaatgataacatgaaaagaaagttcctagaacactgtctggcactaagcaagtatcctataaacatcagctcatcatgtgaccttatgtttgatcccccmcaccatgctggctttctgatgcacagagagggggagtcagggtcttcctatgtagggaaactgagtattcccctgtggtcagggggccattccactctggactgccccagaggctgctgggtctggatcttcagccacttgagtgcatggggtcaggatgggttgagctgtgttgggtgccctgtttggggcggtggtgcccatgcccatgcagggctgggggctgatgctgtggtccccgcttcagctgaaggagtgggtgcagaagctcatgatgaccctccggcacccgtcactgccgctgctggagctgcaggagatcatgaccagcgtggcaggccgcatccccgcccctgtggagaagtctgtccgcagggtgatggcccagtatgccagcaacatcacctcggtgctgtgccagttccccagccagcaggtgcgtgctcccctgcccagccccaccccaccaggatggtcacactgggccggctcccggtctggctcgatatctggcctctgatcaagttgaactccttgagacccacttatagcctaacrtatcaggggccgagggtttccttttgagccttgtctgcagaatcctatcatttactcaaagcaacagttgtttgaatgaacatcagtattccttaggcctcattgcctaaaacccaagattctgaataggagtgagcagttgttgcagatggagtgagcatttcccaaaaaataaactggctgacatcattagaggaaactgcaagtttttttatttttgttttttcactggtttgcagctttgattttctgcccctggattttgtaggtgatcatctgggagctccatgtatgtgtgtgtgtgtgtgtatctgtgtgtatatatatatacacacacatatatatacatatatatacacatacacacacgtgtgtatatatgtatatatacacatacacacacgtgtgtatatatgtatatatacacacacacacacgtgtgtgtatatatgtatatacacacacatatatgtgtatatatgtgtatacacacatatatgtgtatacacacacatatatgtgtatatatacacacatacatgcatgtgtgtatatatgtgtatatatacacacatacatgcatgtgtgtatatatgtgtatatatacacacatacgtatgtgtgtatatatacacacgtacgtatgtgtgtatatatgtgtatatatacacacatacatatgtgtgtatatatgtgtatatatgtatatatacgtatatacacacgtgtgtatatatgtatatatacgtatatacacacgtgtgtatatacgtatatacacacgtgtgtatatacgtatatacacacgtgtgtatatacacgtacatatgtgtatatatgtgtatacacacacgtacatatgtgtatatatacacacgtgtgtgtatatatgtgtatatgtgtatatacacacacgtgtgtatatatgtgtatatatgtatacacacacacgtgtgtatatatgtgtatatatgtatacacacacacgtgtgtatatatgtgtatatatgtatatatacacacgtgtgtgtatatatgtatatatacacacgtgtgtgtatatatgtatatatacacgtacatgtatgtgtgtatatatgtgtatatatacacacatgtgtatatgtatatatgtatatatacacacatgtgtgtatatgtatatatgtatatatacacacatatctgtgtatatatgtatatatgtatatacacgcacacacatgtgtatatatgtatatacacgcacacacatgtgtatatatgtatatacacgcacatacatgtgtatatgtatatatacgcacatacatgtgtatatgtgtatatatacatgtatgtgtatatacgcacatacatgtgtatatgtgtatatatacrtgcatgtatatayacatatatacatgtatgtgtgtatatacatataaacatatatatgtatatatataatattttttaagaattatactgaggtcgggtgcattggctcacrcctgtaatcccagcacgttgggaggccagggcaggtggatcacttgaggtcaggagttcgagaccagcctggtcaacatggtgaaaccccatctatactaaaaaaaaaaaattagctgggcgtggtgttgcacacctgcaatcccaactactcaggaggctgaggcaggagaattgcttgaacccaggaggtggaggttgcagtgagccgagatcgcaccactgtgctccagaaaaaaaaaaaagaatgtactgagatgtcttatcataatcatagttgcatttgtgaacatgttaaaaaaaaaaaaagaatggaagccattccagggaagtaagaaatatctctgttatttacacatcggcctcgcgttgttcattttgttgtggttgttggttttgtggggcatttgaaaggcatttgcactgggaagagcccctctgcctgtttgccttcctgccctctggtgggagggttccccaccatcatcatccacccacccacaaattggtgatttgggaaaccagaggacagtgtagttcaggccattctcggargttaggagttctatgggttggaatgttgttcagccaaagaaagaaagaatactgattcatgctcccacgtggatgaacctattgtgctaagggaaataagccaggcacaaaagaccacatattatgtgattcctctttttttttttttttttttttgagacctcccgaatagttgggattacaggtgtacaccaccattcccagctatttttttgtatttttttagtgragatgggttttcaccatgttggccaggctggtcttgaactcctgacctcaggtgatctgcctgcctcggcctcccagagtgctgggattacaggcatgagccatggtgcccagccctgtgtgattccaattttatgaaatgtccagaataggcacgttcatgaagaaggaagtagattagtggccgccaggggctgcagtgcagggaaaatggagagtgagcgctaatgactacaaggtttctttttagagtgaygaaaatgctttaaaattagatggtggtgatagttgcacaactttatgaatacactaccaaccactgaatgtacactttaaagggagatggtggaatatgatggtgtgtaagttatatctgaactaaaaaataacaaaagccaaactctagaggatcctaactgaaaaagtacacacttggaactttcaggaatttgtcattgatccaggtttttttttctttaaaaatatttttgatgccaaaggcaatacaccgataacattatgtgtaatgataaagacaggacccttccccatgagcaccctggtttttgctagagtgggacattcccatctccttgttccccatcccattgatatgtgcggaatggtataaggcgaatgtgtgcactcctccatgtgatcgctggcattttgagcgcttgaattcctcaccgttgaggggatgaacaggggtgtttcagggtagctggaaggctttgggcctggaattttcaatcttcaaatgagtctcggatgggacctccctgggaggctgtggtgggtcctttaggtcagcagttcccaacctttttagcaccagggaccggttttgtggaagatagtttttccacggaccggggagggggatggtttcgggatgattcaagcacgttacatttatggtgcactttatttctattatgattacattgtaatatataatgaaataattatacaactcaccataatgtagaatctgtgagagccccaggcttgttttcctgcacctagaaggtcccatctgggggtgatgggagacagcgacagatcatcaggccttagattatcgtaacgagcatgcaacctaggtccctcgcatgcacggttcacagcagggtttgcgctcctgtgagaatctaatgctcccgctgatctgacaggaggtggagctcagatggtaatgtgagcaatggggaggggctgtaaatacagatgaagcttcgctccctcacccactgcttacctcccactgttcagccagttcctaacaggccacggaccagtgcycgtttgggtactggtttggggaccctttctttaggggactgctgtgtgtcatytgaatcatcagcagtcagacctgtcttgttttcccatccagatagccaccatcctggactgccatgcagccaccctgcagcggaaggctgatcgagaggtcttcttcatcaacacccagagcatcgtgcagttggtccagaggtgaatcctgggtctccccgtaggatgtggttgtcacctgaatcgtcgcatgcattgcaccagggtggtgctctggggctgtcttcagggcaggcttgaactgagagaaagtgtgttatagtcctgcagtgccattactaacagcagaaccctgggtgaggtactttacttctgtaaatctctgtttgtaaatctcagctcactgcaacctccgcctcccaggttcaagcaattctcctgcctcagcctcccgaatagctgggattacgggcatgtgccaccatgcctggctaattcttgtacttttagtagagacggtgtttcaccatgttggccaggctggtctcgaactcctgacctcaagtgatccattctcctcgacctcccaaagtgctgggattacaggcctgagccaccatgtctggcctataaatgtattaagttttgtgaagtgctgacaaatagtaaatacttgatagatayattagattgagacaatgggatgaaatagctttatgtatgataaaacactgcaaaaattgttattgtggcttttgggacaattgcaaaggaaagtggatgaataattgtatttcatctcaagtagttatttattgtacaggggtttcccgctgcaggactattctgatgacaaaaggattttctttgtttttttgagatggagtttcgctctgtcggccaggctggagtgtaatggttcgatcttggctcactgcaagctccgcctcccgggttcacgccattcttctgctgcctcagcctcccgagtagctggaactacgggcgcccaacaccacgcccggctaatttttttgtgtgtttttagcagagatggagtttcatcatgttagccaggatggtctcaatctcctgacctcgtgatccccctgcctcggcctcccaaagtgctgggattacaggtgtgagccactgcacccggctgacaaaaggattttctgccacttttcatgaaaaatccacctagcaagaaggctttccttatgaagacaatcagggccaggcgctgtggcttatgcctgtaatcccagaattttgggaggccaaggcaagaggatcacttgaggccaggagttggagaccagcctgggtgatgtagcgagaccctgtctctacaaaaaaaaaagaaaaaaaaaatgagtcggggatggtggtgtgtacctataggcccagctactcaggaggctgaggtgagaggactgcttgagcccaggagttcgaggttatagtgagctgtgatcgcgccattgcactccagcctggggacagagcaagaccttgtcttttatgaaaaagaaaaaaggaatcaaagcattcttggatttgaaccagtaaattccaggcatgtttcccatgtgccagaaactcacaggtacaaagaatgtgagattgtagaaaactggcctccttttcaaggagctcctcagctgttagggagagagattttagtgtggattccccacaaactgcaagtttcacagccaagggctaggaagggagtcctcctaaaacacatagactgctaaccttaagcycatcctttaagcttcagagaaacatctaggaaaaatgaaccattaataaattaactgaattttctagcaagttttctgtgctgamcataaatattaaagccctgtcctgtattgtgtaagtatgttttaaaatcacatttgtatcagagtcttttagcatcttggtctgttttgttgtgatttggtgatgctgccatgaagcgtctacttccccacaactcagtggcgcatctcctgagaaacttgactcctgtgttcagatttttggaagaacatccaggttaaaactttgttttaaaagaagcggctaggtgcgatggctcacacctataatcccagcactttgggaggccaaggcggrtggattgcttgagctcagaggttcgagaccagcctgggcaatatggtgaaaccctgtctacaaaatatacaaaaattagccaggcttggtggtggccacctgtggtcccagctactccagaggctgaggtgagaggattgcttgagcccgggaggcagagattacagtgagctgtgattgcaccactgcactccagcctgggtggcagaacaaaacctcgtctcaaaaaaaagaaaaaaaaaaagggagaagcaaaatttacatggggatcttttggtaaatgtttttccagtttgtctttttaaaatggtctctataccttgggtaagtaattgaaaaattttgtttttaacagttaaagcttgctaaaattggctacccctgttcagtatccgaaatctatgaagttttttttttttcttaactctgtggccagaaaggcgccctcccaagtataaggcttgggatctacctactccagttttgcctccagtttgatgtgggactttgggcagggcagtgttctttttggcctgcagatgaatcaactccatatcctttgaaggcctcaggattagagggtgcctctagatactttaaaaaaatttttggctgggcgcggtggctcatgcctgtaatcccagcactttgggaggccaagacagccggatcatgaggtcaggagatcgagaccatcctggctaacacggtgaaaccccgtctctactaaaaatacaaaaaaattagccgagcgtgggtggcaggcgcctgtagtcccagctactcgggaggctgaggcaggagaatggcgtgaacccgggaggtggagcttgcagtgagccgagaatcgtgccaccgcactccagcctggccgactgagcgagactctgtttcaaaaaaaaaaatgtatttttaaattaactaattaattaatttttatttatttattttgagacaagctgtcacccaggctggagtgcagcagtgcaatcatagctcacaacagccttgacctcctgggctcaagcgatcctatcacctcagcctcctatgtagctaggaccacagtcatgcgctaccactcccggctaatttttttgatttttttgtaaagacaaggtctcaccttgttgcccaggytgctcttgaacttctgagctcaaatgatactcacgcctcagcctcccaaagtgctgggattattggtgtgagccaccatgcctggccttaatttttttgttttgttttgtagatatggggtcttggctatattgcccaggcttgaactcctgggctccagtgatcctcccacctcagtgtcctttctaaaatcctttctctctctctcttttttttttttttttttttgagacggagtcttgctctgtcgcccaggctggagtgcagtggtgcgatctcggctcactgcaacctcctcttcccggattcaagctattctcatgcctcagcctcctgagtagctgggactaccggcgcgtgccaccatgcccagctagtttttgtatttttagtagaracagggtttcaccattttggccaggctggtctcgatctcttgacctcgtgatctgcctgcctcggcctcccaaagtgctgggattacaggcatgagccaccatgcccagccaatcctttctctttttaaaaatcataaaaaaaaatactaaatattcaggtactcaaggaagggtgtgagcattaagagcagccttcccttctccccagataccgcagcgggatccgcggctatatgaaaacagtggtgttggatctcctgagaagatacttgcgtgttgagcaccattttcagcaaggcaagagatgctgatgccaacaccagtgggatggtggggggcgtgaggagcctgagctttacctctgtgtggtgttttgtctcccccagcccactacgacaagtgtgtgataaacctcagggagcagttcaagccagacatgtcccaggtgctggactgcatcttctcccacgcacaggtggccaagaagaaccagctggtgatcatgttgatcgtaagcaggaagagggcctgttactagactgggggtgggtcaggagtccacaaacgttttcttaaaagggccagaaagtggctgggtgcggtggctcatgcctgtaatcccatcactttgggaggctgaggcgggcagatcacttgaggttaggagtktgagaccagcctggctaacatagtgaaacctcgtctccactaaaaatacaaaaattagctggccatggtggtgcatacctgtaatcccagctacttgggaggctgaagcagaaggatcgcttgaaccctgaaggcagaggttgcagtgagccgagattgtgccattgcactccagcctgggcaacagggtgagattctgtctcaaaaaataaataaaagaaaaagtaagccagcaagtaaattttttagactttgcaggttggtgtggtckctgtcgtgaccactcaacactgcctttgtacaatgtaagggaatgggcatggctgtgttcccataaaactttgttgggagcccgaggtgggaggatcacttgagcctaggagttcaagtccagcctaggcaacattgcaagactccatttcttagaaaaaaaattaaaactgggcactgtggctcacatctgtaatcccagcactttgggtggctgaggcaggagaatcactcgaggccaggagtttgagacgagcctgggcaacatagggagacccccatctctacaaaaagtacaaaaattagccaggtgtggtggtgtgcacctgtagtcccagctactcagggggctgaggcaggaggattgcttgagcctgggatgttgaggctgcagtaagctgtgatcacaccactacactccagcctgggtgacagaatgagatcctgtctcaaaaaacaacaaaaaaaatcccaactttgtatacaaaaacaggcaatgagtcgggtttgttggcactgggaagatcatgactaatgcaaagcacctagtttgtgccaggtactcctgaagtgctttccaaataaatagttgctcatttaattcacgcagcagtcctagaaagtgggtactgctgtcacagctctttggcagagcacagagaggttaagccacttgcccaagggcacccagctcctaaatgtagagccaggatttgaaccaatagtctgactccagactcatgaactattagccgcaggatattggattttgagtcctgtgtgtggagaagaagaaatatggagtctctgttcttgtttctctttccactcgatgatagcagtcttttgttttttgtctgttttttcttttgagacagggtctcgctctgttgcccaggctggagtgcagtggtgccatcatggctcactgtagcctctatcccctgggcttaagccatcctcccacctcagcctcccaagtagctgggattacagactcacaccaccacgcccagctagtttgtttgtttgtttgtttgtttgtttgtttgttttgtagagatgaggtctcactatgtttcccagtcttgtctcgaactcccgcgctcaagcaatcctcctgccttggcctcccaaagtgctgggattacaggcataagccactgcgcctggccgataatagcagtcttttataactaaaaatatttttctttgatatgtcccttgcaactgacttggaaaatgtaggatcagcagagtaagagcaacttggacttggcttatagtagaaaggggtttggcaatttttttttttttttttttgagatggagtcttgctctgtcgcccaggctggggtgcaatggcayaatcttggctcactgcaacctccgcctcccgggttctatctatcttctatctatctttttttttttttttgaggcagagtctcactctatcccccaggctggagtgcagtggcacgatctctgttcactgcaacctccacctccagggttcaagcaattctcctgtctcagcctcgtttagctgggattacaggcatgcgccaccacgcccggctaatttttgtgtttttagtagagacgtggtttcaccatgttagccaggctggtcttgaattcctgacctcaggtgatccaccagcctcggcctcccaaagtgctgggattatagacatgagccaccacgcccggcctggcaacttttttttgtaaagggctccagatagtaaagattttaggcttgaggacgtccaccccctattgccactactcagctctgtgagctctgccactgtagcctgaaaactagacaataggtacatgaatgagggtggctatgttccaataaaactttatttacaaaaacagtcagtaggcagagtttggccacgatctcagagaatagttaataccctgtcccctgtccaagttgcattaataaatattgggatttttggtaaagaatcatttaaaaatctcacgcagcagcttttaatcctggctgtacattagaatcacctagggggtggggagacttaaaaaatacaattgcccatgccccacccttggtcaatttaatcagagtttctaggggtagggcccaggcattagtgctttttgaaagtttccctgtgggaaacctaaatgtgcactgtatattagataatattattggtttaatgttcagtttctttggtgttttaatggttctgtagtaggtggaagggagatatgtgcgaaaatagtgtaaaggattgtggtgtctgcaactgactttcagaaaaagagagagtgtgtatgtgtatgcgcacgtacgttcttattagagaaaaatcaaatatgataatgtggcaaaagttttaacaattagtgaatctaggtgattactatgggtttttaacatactgatcttcaattcttctgtagttttgaagtttgtaaaaattaattgggagagaggactctccaagtgattgcaacacgcagccaggactgggaatttatgcccaaggagatatccactctttggggggagttctattactaaaataatataatgtttttcaaaatacattctttggatggagtttcctggagtttgagtgtttgtcaagcaaaatatgcctgtaatctattacagtcagcttgccattcaaaggcagtgggtctgtgggttattttgctgttcgttcttctgtgcacatattgactctcttctgggcatgaagtcatgaaatatcatgtacaccagaggacagccaagggaagatgggtggagcagcccccagttcttgggaattgggacattttcctggacctccttggtgatagaggctaaaaatgttgaaccaattacagtctcgggataaatgtgagattcattattcttctractttcttggtcccatttgttagaaaatagtgagttctctgcacctgatggtatttggtacctgagaggttttgaacaaagacttgtgaattgaatgattatttcgaaatgaatttttttgaggcttttaaagggacctagtttctgacaccagttcactggtcatgggacttcgttagtgacaaaacgaagcaaacaaaacatgattctgagaactaaaatatacaagatgagactgcttcacaaagttaacaagaaagaaaaatggtgttgttgttgttgttgttgttgtttgtttgttttcgagacagagtcttgctctgtcacccaggttggagtgcagtggcgcaatctcggctcactacaacctctgcctcctgggttcaagtgattctcctgcctcagcctcccgagtagctgggactacaggcacgtaccaccacacctgactaatttttttgtagttttagtaggaaacagggttttgccatgttggccaggctggtcttgaactcttggcctcagatgatttgtccgccttggcctcccaaagtgcagggattacaggcctgagccaccatgccctgcctagaaaaatgtttttgttattattattattatcttttgtatgtagaaggcaatggttagattttttaacattcacacttagatgtgtggggggaaatttaaaaaatgttcacacaaactcttgagtttttcacctcttagaaaagcaccagtctagctgctggccagcacctgtgctgtctggcctgggagccacatgcctaggggattggtggggagttatgccaccaccgtttaataatagaaagcaaatcagagaagggagaggagatttagaacactttcctaccacatttcttcagcattgatgttcctgtgtctttgtgtatgaaatatcaatatgttgaagttttttctgatgataaaatcagtctcggttcattataataggaaaatgcagaaacacatgtagaaaaaaatgccccacagctctaccatctggtgacctcttgaagaccagtcttagtggatgcccggggtggggaatgggggcatattgctcaggagctctgatatttagcattcattgctccatcttcagtgggtggttagggagcacctgcgctgagctgttcccaagccccatatgcacttagggcataagaggagatgcgaacaccggctgcacccaggcctggtctccagcagaaaggcccttctttcagaagcagagaggagggatgcaacacagacacattgtccctccctctcctgcaagattcaaccccacgtccctctcctctgaaaccgtgagcgccttaagtcaggcagcaatgtgtaggggaaggagcgggaggctttgggggcagaatagtgctgtgttcgaatctggctctgtcttgcacatgtttgctggctttggggtgaggcatattgcctctttgagcctcagtgttcctatctgtaaaatgggaatcaaaataagtaactcttcgtgggggtgggagaatttggggagttgtatataaagggtctagctgtttactagccacctggcacatagtatgtgcctgataatcactgacctttttttttttttttgggggggagacagagtctggctctgttgcccaggctggagtacagtggtgcgatctcagctcactgcaacctccacctcccaagggatgatcaaatcatcctcccacctcagccttctgagtagctgggactacaggcatgtgccaccatgcccggctaatttttctatttttttttttgtagagacaaggttttgcgctgttgcccaggctggtctcaaactcctgagctcaagcgatcctcctgcctcagccacccaaagtgctgggattataggtgtgagccaccatgcctggcctaatcactggctattaatagtaacgtaggcagggacttagttgtatttgtttgttcttaccaggcatttagggcatgttgtggggtggatgaatgggtggccgagtgagtgagtgagtgagtgaatgaatgactgactggggtgggtgcacagtagaaagtggtgagggtttgcataacaggctgtgctgggcctgtttggagagtggagcagccgcctggcttttgcggcaggtgctccccaagtcgagatgagtgctgcatgtttccctgggctggagaaaagccatttggcttctttttctgtcccctaaggatgagctgtgtggcccagacccttccctgtcggacgagctgatctccatcctcaacgagctcactcagctgagcaaaagcgagcactgcaaagtggccctcagagcccggcaggtagggtctcagggtgcggtccccacgatgtgcgtttccccccaccctcctatgtgtcccctaccgtgctcagccctcaccatgcacagtcccaccgtgctgccggcccgtgcccgagcctctgccttctgccctgggaggttggctcacgccagcgcccccatccctccccctgcagatcctgattgcctcccacctcccctcctacgagctgcggcataaccaggtggagtccattttcctgtctgccattgacatgtacggccaccagttctgccccgagaacctcaaggtgagcccgtctccttcctttcaccatctgcagagcacacactgtggcccaggtgggggcctctggggaaacggctcctcctgccctccaggtgctcagtggggtgcagggcacagccacagatgcagacagttcagcccaatgtggccagggctgcccgaggggtcacctggggagactctaggagaggtgggcatggagcccagtcctccaggaaggacagtgtgacagcagtgggggctcacctggtgcagtttacaaacctcagccatatggagcatatctggaagctgtgagccctcctgtggctgagtcgcggcctcatcttccctattcctggactctggctcatttacatgttctcaggtaccccctcagtgcctgatgggagacctgtcccaggtgccgtcatcccggagttcttcaccagctctcctatgattaaataggggaggagcccagcgcgctgcagggcactgatcgcttttagtggtcaaagcatgacttctgcctgctcccaccgcccccactcatcagactggtgattaaaaaacttactcactggctgggcacggtggctcatgcctgtaatcccagcactcgggaggccaagactggaggaycacttaagcccaggaatttgaggccagcctgggcaacatgtgagaccctgtctctacaaaaaatagacacacaaaaaaaagagccacgatgttggcgcacgctgtagtcccagctgctcaagaggttgaggtggggagatcgcttcagcctgggagtttgaggctgcggtgagctatgatcacaccactgcactccagtttatctcaaataaaaacaaagaaaaacctgaaacttgttcacatttacttttccttgtttccccttttcatttcccttagaaattaatactttcggaaacaaccatcttcgacgtcctgcctactttcttctatcacgcaaacaaagtcgtgtgcatggcgtccttggaggtaagcaggagaggcccagagaacagcactgaccatgccagttctagtgttcactgccgctaccatgcacctgaccctaggccacatgccttggtgaatgtgatcctatccttttctcttcaaggtagctatgttaatagtcccatcttacagaggaaggaactgaggctcagagaggtcaagtgacttatgcaacgtcacacagctagaaagtggcagaaccaggttttgcattattgggtctgcctcattccagattccatgctagtyaccactgctgtctcatgtcattccagcctcttccaggcagggcacattaaatactaatccctgagagccaagtctgaggcacctcatctaaactttctgactcacgtgcattaaatacctttgaaagacttttctgcttggaactgccagagctagaggagcccaggtgacaacttaaggtgaccccctgccccccgagtgatgaggtagaagggcgtggccagtagcaaaacccagattagagccaggtgatcccaggtggtcttgctcccgggagcaagaattcaggtcttcttgaattcaggaaccaagaagtgttgtgttggttccaggaaatcagagttttaaatctgctcttttwttattattattattattattttgagactcgcttgtgcctagggtggagtgcagtggcactatctcggctcactgcagcctctgcctcctgggttcaaatgattctccttcctcagcctccccagtagctgggcctacaggcgcccaccaccacacctggctaatttttgtattgttagyagagacagggtttcaccatgttggccaggctggtctggaactcctgacctcaagtgatctgcctgcctcagcctcccaataaatctgctgcccttttagaatctttttaagaaaatatgtttttaacacggccctcttacccgggtctgctttgctggcagtagtttttccaatattctttatcttctgagctcagagtctcagtcccctgttgcccccactttctcttctgcatccttgggagcctgtgagtcacacagtgagaaggtttactgggtcttctggagaccatcttgggcttgttagcatattacagccacagggtctcctgggcctgcaacttttattcctctatgggtttcacctctggaagaatctttctcaggcctcactctttgtttctaacagggagacctaatacacctcttctgtagttactttaaacacaatttttgttttgttagagacaggtcttgccgtgttgaccaggctggacttgaactgctacgctcaagcgatcctcctgcctcaccctccccagtagcttggactacaggtgcatgccaccatgcttgacttacagttactttttaaagtgctaaatgctgtttgtgtcaattagagatttttctaggatgcttttgggtttttttatttgttttgtttttccaccacgcccagctaatttttgtatatttagtagagatggggttttgccatgtcatccaggctggcctggaattcctgggctcacgcgatccacctgccttggctccccagagtgctgggattacaggcgtgtgccaccatgcctgaccccattcttgacagggaatggtgggaaccttccccaaattcaagttccccagtgctggccaagggcaagtcttttaatggaaagcaattatgtctgctaattgctgtattagctcctgctgcccagttcccgcatttcctgttcagttgaaaagcttccagtgtttaaactccagaactgcattgtccactatggcagccaccagccacgtgtggttagtgagcacttgaactgcatccagtctaaatcgagctgtgctctaagtggaaaatacacactccattccaaagatgtagtactgtatggagaaaagaatgtaaaccatctcaataatttcttatattgattacatgttgaaatgataatatttgcatatgtggggtgaaataaaatatattattaaaattattttttatcttttttctaagtggttactagaaaatttaaaattataggccaggtgaggtggctcatgcctgtaatcccagctctttaggaggctgaggtgggagaatcactgaactcaggagttgcagaccagcctgggcaacataggaagatcctttctttactaaatataaaaaacaaaaaaaattagccaggtgtggtggtgcctgtagtcccagctacttgggaggctgaagtgggaggatcctttgagctcaggagttcaaggctgcagtgggttatgatctcaccactgtactccagcctgggtgatggagtgagaccctgtctcaaaagtaaataaataaaataaagttacatacacagcttgtgttatatttctgttggacagcactgctctaaagcagggtttgataaactatagaccatggaccatatttggcccaccacctgtttctgtaaagttttatcagaacgcggccaggtacggtggctcatgcctgtaatcccagcactttgggaggccaaggcgggcggatcacctgaggtcgggagtttgagaccagactgaccaacatggagaaaccccgtctctactaaaaatacaaaattagccaggcatggtggtgcatgcctgtaatcccagctactcaggaggctgaggcaggagaatcgcttgaacctgggaggaggaggttgtggtgagctgagatcatgccattgcactccagcctgggcaacaagaacaaaactccatctcaaaaaaaaaaaaaaaaaaaagaagaatgcagccacacccattcatttacatgttgtccacagctacgtccgtgctaacagcagaattgagtagttgcagccaagatgatatgtcccacaaagcctaaaatatttactacctatctcttacagaagtttatcaacccctgctctagagtttagagtggattttgtgtaactagtaacactctgaaatatgagcaaatttgctcttaactgctgcttagaaatctttttttttttttaattgaggaaggatttttctctgttgcccaggctgaagtgcagtggtgctatcatagctcattgcagcctcaacatcctgtgctcaagcaatcctcccacctcagcctcccgagtagctgggactacaggcgcctgccaccatgcctggctagtttttgtatttttagtagacatggggatttgccatgttgcccagactggtctcgaactcctgggttcgagtgacctacctgccctggccttccaaaatgctggattgcaggcctgagccactgcacccggcctgcttacagatagatattttagaggtcatttctggtacctgttccccgtgagtgccctcagcttttgagcacactctgcagtggcccctgagagaatgtccgtgtgtttctgccttgtcaggtttacgtgcggaggggctacatcgcctatgagttaaacagcctgcagcaccggcagctcccggacrgcacctgcgtggtagaattccagttcatgctgccgtcctcccacccaaaccggtatggagtggracacacccagggacggcctgtgtttctgttcttcctgacctctgtcgtcctgtctctggaaggacctggcaagtgtgtttgggcacgctgctggggagacatcagcgataagcacttcccctgtgggagctccctgcagcgccattttctcccctctaacatggtgataatgcagagcccacctcctacacctgcactgttcagtacagtagccatgtgtgcctatttacattaaaatgaatgcacatgggccaggcgcggtggctcatgcctgtaatcccagcactttggggggccgaggcgggcagatcacttgaggtcaggagttccagaccagcctggccaacatggtgaaaccccatctctactaaaaatacaaaaattagccgggcgtggtggcacatgcctgtaatcccagctactggggaggctgaggcaggaggatcacttgaacccgggaggcagagtgagtcagtgagctgagattgccccactgcactccagcctgggcgaagaagcgagactccgtctcaaaaaaaaaaaaaaaaagaggccaaacacagtagtggctcacacctgtaatctcagcactttgggaggctgaggtgggtggatcacaaggtcaggggttcgagaccagcctggccaacatggtgaaaccctatctctactaaaaaaaatacaaaaattagcctggcatggtggtgtgcactggtaatcccaggtacccgggaggctgagggagaactgctcgaacccgggaggcagaggttgcagtgagctgagattgcaccactacacgccagcctgggtgacagagcaagagtccatctcaaaaaaaaaaaagagaaaaaacaaagaatgcaaatgagccagccatggtggcccacacctgtaatcctagcacttcggagggctgaagggggcagatcaggaacttgaggcctggagtttgacaccagcccggccaacttggtgaaaccccatctctactaaaaatataaaaatttgccaggcgtggtggcacacccctgtaatcccaggttactcgggaggctgagggatgagaatctcttaaacctgggaggcagaggttgcagtgagccaagattgtgccactgcactccagcctgggtgacagagcgaaactctgtctcaaaaaaaaaaaaaaaaaaaattcagcttctcagtcatactgggtggctcatggctgccatattatttgacagtggagttctagaacattctgtcatggtagaaagttctagtagacaatgccacccaagccattgggaagagtcatgagataaggcacatgtagcattttagacagtgcctggcacaaaggaagttgttgactgtaagtgatcccggagatgatcatgactaacgctgttattaccatctagtggcatgccattggcctgggcactctgctcagtgctcccacactcttttatttatttattttttttgagatggagtctcgctctgttgcccaggctggagtgccagtggcacaatctcagctcccagattcaagcgattctcctgcctcagcctcccgagtagctgggactacaggcgcacaccaccatgctcggctaatttttatatttttagtagagatggggtttcatcatgtcagccaggctgatcttgaatgcctgacctcagatgatccacccgccttggcctcccaaagtgctgggattacaggcgtgagccaccgtgcccagcccacactcttattttattcagctcttatcctctatcggccaaaaatgtgttctcatcctcgttttacagatgggagccctgggccctcacctgacctaggctgagctgcttgtgcacgtggagtgggaatttgagcccaggccacactctcacctccaagtcctttccacagcattcaggggccctctgagccaggtgtgagggcacctgtcctgtctgtgtccactgtagtctgctgtccaagagctgtagttcagtagataccctcagtgttctcacctgagaatatctttttttgatttttttgagatggagtctcactctgtcacccaggctggagtgcaacggcgcgatctcagctcactgcagcctccgcctcctgggttcaagcgattctcctgcctcagcctcctgagtagctgggaccacagtcatgcaccaccaagccccactacttttttttgtaattttagtagagatggggtttcactgcattgaccaggttggtctggaactcctaacctcaaatgatctgtccacctcagcctcccaaagtgatgggatgacaggcgccaccatgcctggctcacctaaaaatatctgatgtgtctgagttcctcactcacagtctttttttcagtccatcttgtttcaggacccaaagtattaataccatttaggtcaggtagagtgggataccttctcttaaagtaattatgtctccttgggattcgaagtgttctctctcacgctccctcacccctctggttttagttcttatgggggtgcccaaggccttacctacggcggcattgatgtcattgtgatttgggagttcggttgatcagatctgtacaggcaatagggttcatgctttggtgaagcggggatttttctggcctcttaggatttttaaaataactttcttttcctgttggttttaagaagaaagatgctgctatgttttggatgaagaaaagggggcttccccacgaggcactgcctttcctagttatttgtttttacccttcttatttccaaaaataggattgtgacattttaccccattgagagaaaggggactgactgcttgcagcctggggtcattctggggatttggagagcagtggtggtgtaagatattttgtagctgtctactcctgagaaggactcttttgatttttttgtttggttgtttagagacagagtctagttctgtcacccaggctagagtgcagtggtgtgatcatagctcactacagccttgaactcctgggctcatgtgatcctcccacctcagctccctgtgtagctgggaccacaggcttgcgccaccacacctggctaattctttaaaaatatttttttgcagagatgggggtctcactatgtggcccaggttggtcttgaactcctgggttcaagtgatcctcctgcctcggcctcccaaagtgctgatattataggcgcgagcccctgtgcctggccttctcttttgatcttattgtcccagcaagtcagccctgttaggaagggaagggcggctctcctgagggctgtgggtcatgccttgtgagctacacgtatatccaggttattggttgtgattttcagtatgggcacagggtccttttttgacccagagagacattgaggaccctgggggattcctggccatctaagattctcatgattgctctcagtgccagaaatgtactctgggcctgtgaagagaccttgcctgcggctgcccccaccaaccagccctttaatgcctctgtaaagggccatgaggaataaagtctatccccaagatggcctggcttggccctcaacacttgtgtgtgtagagccaggcacatggtgctttaggtcaccgagacccaagggaaggtcagatgagaagttggcagggctttgtgccagctgcagcctggacctggacctctgtgctgggtgggaactggctacatccccctgcgatggggctgctgtcctagctctgcccactgttgccctgcaggaaactgaccatcacaaccagacttctccatgattttttccagcagaagcaggaaatctatttttttttaacctgaagtccttccatttttcaatggggacaggtaattcatgttaaatgaatacatgaacacatgttaattcatgtatgttattaaaatgctgcatggaccaaagtcattctgtgagtggcattcagccacactgccactgcaagtttgtgacccctggattgagctgtcggggagcagaggggccatgatcgtgatttcagagcacccaacaggaatgcacacacctgtgtcagggtccccaaaagcacccccaggttcgatcatcgcctaggagaactcacaggtctcgggacatagtcatgcttatagctctgacttattagggggcaaggatacaaagcagttagccaaggcagaaggcatcagggtgaagtccagaggaaagcaggtgtgctgccagggtcctctcccagtggattcacgcagggtgcacttcattcccccagcaaggagttgtgacaacacaagtgaagggttgtcttccagccccgcaccagggattggtggctggtcacatcaccctctgctctgcatcgaaatctcaggcttgcagaagaaagcaggtgttcagcataaaccacactgtttgtgcaaacagttgaggcacagtgagccccccttgtcaccttcagggaacgataggaaccttccccaagtccaagttcccagaggccagccaagggctgtccttgcaagcaagcaggtctcctttctcagaagagcagtgtggggcctgctgtgctgacttcctgcacaccatttcattacccctcccgtatctgattccaaggcccaattctaacaacctcaggtggcccattgagatttgctgctggtgagcagccagttctgggagcatcgttgtctaaactccagaaggctgctgactttgtcccaagggcaagtttgatggagggattacagggagcagaggactggagtgtccgtcaggaccaagcctgactgcctcaccagctgcctggggctggtggatttctccaggagaaattgatgctgggagtgtttcttctctgtggtcaagttcagcacttggggctcccctcgggactgtgttgagactggactctcatgcatgaatcattgattcctacacttgttgagctcttactcttcaccaggtcctgagggatcagatgagaccctcctcaggccccggccccagccattgtctcatcccctgcccattttaagcccccatttggaagagctctaaatctggtccagctcactgaagcttcaggagtaggagcagctcgtagagttgggtctgcaagcagctgcctcatccccgacttgccatcaccytacaggatgaccgtgcccatcagcatcaccaaccctgacctgctgaggcacagcacagagctcttcatggacagcggcttctccccactgtgccagcgcatgggagccatggtagccttcaggagattcgaggacttcaccaggtacccagcatggcccggtctccaacaccctgagcatgggggctgsgcagacttcccttgaatccccccccaattcactggacagatggggtgggagagacccagacaygtggcacagcatgtcaataacaacagaataataatagcattgtagccaagagtatgagcctacatgtcagcttgcctggcacagcacatcaataacaacagaataataagagcatcgtagccaagagtgtgagcctgcgtgtcagcttgcctggtttgaattctggctatgtgctttctaactaagagactgagcaaaatatttttacctctccataccttcgttttcttatctgtaaaatgggaataataaaggactcacttcataggtgcgccatgagaattaaatgagataacatatgtgaaataacatatttaaagtataattagtatgcagataatatagtgactaaatgttagctctcaatagttactgttatagtcttttttcagcctttcactgtgtgttctgctttgtgcttggagtatcttgtggaattttcacaacagcctcatgaggcatagggattactcttattacctttctttgactcggggtgaggtgaggtttctaggatctcccagccagtaaaaatgggagccaagagttgatctcaagcccagctgatgcctgaaagcgctggaatccttccctgtattcctgatcacagatcacttaggttcattcttcccttttgggaaggaccccatcacgggtgctctggacaaagtagacagggaacctcctgagctctgtagagttggataagatcaaagggtgttggctgggaaattgggagggtctggcgttccctgctgcctggcttggaagcttgacctcatccccatgggtcagcagcccctcagccctccctctctacccgcacccccagaaattttgatgaagtcatctcttgcttcgccaacgtgcccaaagacacccccctcttcagcgaggcccgcacctccctatactccgaggatgactgcaaggtaagcgtctaagcccagggagcaacctggggagcaggtgggccgtggyccccaggctttccagccctaycccttgcttctccctmtcagagcctcagagaagagcccatccacattctgaatgtgtccatccagtgtgcagaccacctggaggatgaggcactggtgccgattttacggacattcgtacagtccaaggtactctgggcgtgcctctggttttggtgggggttcttggagaaggaggaggggctgggctcgtcgaggcggcccttggggaggcaggcgtgctgagtacttcagagccacagacctggcttcccactctagctctgctcgcctcatagctggcgaccttgggcagatgtggctgaacgtggggtcagcatttctctcrctcacggtgttgcaatgattcaatgacaaagtatatacacggcttagccagtcccaggtacggagggcacacccaataaatagtttggagattttctgggagtgtttttgttggaataatccagaaactggcagttttaaaatggctacttacattgatgaccaagtgtgccaataacagcaggttgctctgtaagcctgtgatgccattgtatttcagcctgggggacagagcgagaccctgtctcaaaaaaaattatatatatttacagtatacaatgtgatattttttaattatctttttaataacagctttattgagacatcattgacatactacacaattcacccatttaaagtgtgcagttttgcagccataaaaaagaatgagatcatgtcctttgcggggacatggatgaagctggaagccatcatcctcagcaaactaacacaagaacagaaaaccaaacaccgcatgtgctcactcataagtgggagctgaacattgagaacacatgggcagagggagggtaacaacgcacaccggggcctgtcggggggtgggggccgaggggagggaacttagaggacaggtcggtaggtgcagcaaaccaccatggcacatatatacctgtgtaacaagcctgcacgttctgcacatgtatcctgtttttttttttagaagaaataagaaaaaaagtgtacaatttaatatatttttagtatattcaccaggttgtacaaccatcaccagaatcaattttaggacattctcatcactccatagaaaaaccctgtacctgttagcagtcactcccctctgtccccaacccaaaaaccctctccccaccacagccctaggcaaccactaatctactttctctctatatagatttgcctatkctggacgtttcatataaatggaatcagatcacaggaggtctcttatgattgacatcttccacttagcataatgtttacaggttcatccgtgtggtaacatgcagcaatacttcagttccttttacggccaaataatattccattgtgtctttggtttttaatgcagaaaaatatccttgtggattatggactccgacgaatcacattcttgattgcccaagaggttagttcacagttcatctctatgagtctttcccattctccaagccttggtgtgtgccatttatttgatatttattttgtagatttgggtgaaagagatcattagaaaggagaaggatttccaaatgattcattctagaagtgaatgtaatcgtttacaatcactaaataaggatgtacatatttcagtgcgtcttgcttgatttaattgtcttgtgtgtggatttctttttgcagaaagaatttcccaagtttttcacattcagagcaagagatgaggtatggccaaaagtaatgatgttttctcttctctagcatcttgttttattttttaagagatgggatggggccgggtgtggtggctcaagcccgtaatcctagcactttgggaggctgaggcaggaggtttgctagagctcaggagttctagaccagcctgggttatatagtgagaccctgtctctacaaaaaaattaaaaaatcagcctggcattgtgatgcaagcctgtggtcccagctacttgggaggctgaggtgggaggattgcttgaacctgggaaatagaggtttcagtgagccaaggtgattccactgcactctagcctgggtgacagagtgagactctgtctcaaaaaaaaggaaaaaaaagagatggggtctcactatgttgcccaggctggactcgaacttatggctcaagcgattctcttgcttcagcctcccgaatagctgggactataggcacatgccaccgtgcctcccagctccctggcatctttgatattcatgaagaatatagtctgcagtccttaaggcatccccatattcaagaatgtagcaacttttgtgtagactgcagtcttcctctgggattgtatttccattgagagccctctgttccctgcatggcactcagacctgagaatcttgccctttcagcctcactacaggtttctgtcttgcttgaataattttcagtacttgctgatgtactcagtaagacattttttccaaactgtttttcttatgctcgtctagaacagtggttggcaaactcacttgcagaccagctgcctgtttttacgaataaagttttattggaacacagccacacccgttggattccacattgtctactctggctttcactctaacagtagcagaattgagtagttgtgacagagcccgtatgatccatcagcctaaaacatttactctctggccatttaagaaaacgtttaccgatccctgttgtagaacaggtaggtttattcccagcactgattcaagaccccaccaaattcagcattttgcattttaatttatccaaagctttatttttctagctaagacacatccttttcttaatgtcttcattttttttttcagtttagtttccagtactgtcagttgctttcttttcsgggaccaatttccaccaagaaaccaggggttagtggcttcatgagaattgccacaggctgtgacagatggagaacagcctggtcacgctggcaggtgatagggactagctaggttcccccaggagccagcgctgcacccagcacaacaggcttgcaatgcccatagctctcctcagatcttagcaaaaccccaaatatctggagccctgggggtagcttacaattagggaacatcatgaatgctgcattcctgagtgccaaacccatggacaccaggggtctgcagagtagggtgtggaccaagcagggacgcagctccaacgtcacgctgtgtgtgtatgtgtctgtcttctctctctggtccgcctacagtttgcagaagatcgcatttaccgtcacttggaacctgccctggccttccagctggaactyaaccggatgcgtaacttcgatctgaccgccgtgccctgtgccaaccacaagatgcacctttacctgggtgctgccaaggtgaaggaaggtgtggaagtgacggaccataggttcttcatccgcgccatcatcaggcactctgacctgatcacaaaggtaagatgtcgcagagcatttcttcctctctcagaacctggccctcccttccttacattcctgctctgtgctgggtcctgggctgcatgctggggatggagagtacaccaacacccagggtcctgcccttgctatgctccagtccagggcaggaggcggacagcaaagtggcctgtgatcacgtccaggctggtggcacttggatctgtttcttgtattatgtgggtctctgcgcatgagaagaaaatttccaggatagaaaaatactggtttgttcagggaatttcttaatatttgctgactgagtgatcgttttccattgtttcttgcatttagaaaagtaatccatggccgggtgcagtgacccatgcctgtaatcccagtactttgggaggctgaggtgggcggatcacttgaggtcaggggttcaaaaccagcctggccaacatggtgaaaccctgtgtctactaaaaatacaaaaattacctgggcgtggtggcgtacacctgtaattccagctactcaggaggccgaggcatgagaatcgcttgaacctgagaggcggaggttgcagtgagctgagatggagcccttgtacttcagcctgggggatagagtgagaccctatcacaaaaaaaaaaaaaaaagaaaaaaagaaacagaagtaatccatgattatattgtgaaaattttaaataagactgaaaacgatttttaagaacctagcgcaaggaccgagaatcctgtcactgaggggccagcttagttgttgactgtttctagacacaattccgtccctgaaacctagagttgtaggcataagttgcagataagagctgagagtggacagatcatttgaatatattattctttaattggtcagtcacttgtggacctctttcattgttaataaagagtggtccaccacatattatttccttgcatggatgtaccgtgtataattttttttttttttttactaatcccctattgatggaaacatatatatattattatatatataattatatataataatatatataatatattatataatataacatataatatacataatataatatataatatgttatataacattatatatacataatataatacatattatatgtatttatataaatatatatttatataaatgtatatataattattatatatatatwtttttttggagatggagttttgctcttgttgcccaggctggagtgcaatggcacaatctcagttcactgcaacctccgcacccccgggttcaaacaattctcctgcctcagccttctgagtagctaggactacaggcacaccccaccatgcccagctaattttgtatttttagtagagatggggtttctccatgttggtcaggctggtctgaaactgccgacctcaggtgatctgcccacttcggcctcccaaagtgctgggattacaggcgtgagccaccacgcctggccctattgatggatattaagctaactgcagtttttttgctacctgtcagctagatgttttatttttattttgatacagagatttgctcttgtcacccaggctggagtgcagtggcgtgatcttggctcactaccacctctgcctcccgggttcaagcgattctcctgcgtcagcttcctaagtagctgggattataggcgcccaccaccatgcccagctaatttttgtatttttagtagagacggagtttcaccatgttggccaggctggtctcgaactcctgacaactgatccacccatctcggcctcccaaagtgctgggattataggcgtgagccactgtgcctggccaagccgttttaataggttttattattgttgaggtatggtgaggccaacagataaggagacaactgccatcaaaaagacagtttattactcatagttcccaagaagaaggggttttccctgccatggggccacatggggaggctctggggttggtcaggcagcagagggacagaggggaagacatggaagacgtggacgagagccttgattgtggtttcctggagaagaaaaaagtgaggctgagtaaacaggtttaggattggctgtgaatcatctcagcagaccctggcatatagaagctgtctctggttctcaggaatctggccctgggtgattagagcaggtggtttgtgtccccaggtatgatccagggtcagcaaggccccaggtgtcaaagtgtcagaatgcagaaaataggacacatgtcaatacactcaacagctttgcagtcccttcgcctctgagaggcagggctctgctgttcttgcctggcacactttttggaggaggggaatgttttcctcctgtctctgcctctttggggctgagtttccagccagctgggagtaggcctgcacccctggcctgagcagctgcccctcccactctttggcaggaagcctccttcgaatacctgcagaacgagggtgagcggctgctcctggaggccatggacgagctggaggtggcgttcaataacaccagcgtgcgcaccgactgcaaccacatcttcctcaacttcgtgcccactgtcatcatggaccccttcaaggtctcgcctttgcaggggggctctcaccgggctctgggttcaccctctgagccatgctgctttggggtattgtctcttgccactcaagacctgggttccaggatgaaaccatgcgtatctgagcctcagttgctgcgggaggagagcaaaccttctgccattcaattctagagctatgttttagccatgccctgcacgggaatgctttactttaaggatgacaagcatgctcaaaatgtctttcaaaacaaaattttgtcctttccctggttccaggctgcgctggggactgcatgtgggtggggagagacgtgagaccgtgaggtctgtggctgaatgttccctgtcaggtggctcttcacgagcagacagacttttatggtggtgattctggaatgaaagaagccccacttgtaatcccagtactttgggaggctgaggtgggtagattgcttgagcccaggaatttgagacaagcctgggcaacatggagagaccctatctctactaaaaattttaaaaattaaaaaataaaatattaagattattaatcaaattaatattaatatcgatatattaatattattaaaatatataaatgtattttattttattatttaataatatatattattaaaaataattaatacaatagtattattaaaaagagaagtcctgatacatccgtttggtatctgggggattcaggggacccatgtggaggctctggcctcactagttcaggtagttccagaaggaagcagtgcaatggcttgagtcaaaggcatgtaaagatagtataacatagcagtactagttcagtcacttatcagcctcagtttccttatctgtcagtgagggattagaaaagctcgcctctcttgagtacttacgaaggcaaaatgaggtagagttttaaatgcttagcaagagccgttgcttgttattagttaatactttttgttggatacacactatgtcccaggcgtttttgcagtcagtatatctcatcctcttattagtatcagtgctattgcaaatgtccttgggatgtcttggccctgaaactggaattgctgtgttttggggcagatcgaggagtccgtgcgctacatggttatgcgctacggcagccggctgtggaaactccgtgtgctacaggctgaggtcaagatcaacatccgccagaccaccaccggcagtgccgttcccatccgcctgttcatcaccaatgagtcgggctactacctggacatcagcctctacaaagaagtgactgactccagatctggaaatgtaaggctggcccgcgccgtgggggtctaagtcaaagcagaagcaggctkcttgggccatcaatttgtagattaagatggcatttggaggcggtcttgccttgctctcccatgtcattctgggttggggtagccccctctgagtgttatgttaaatgtgttagcctttgaatcttggtttttcactcacctaaaaaggagagtgaatctccaagtttaatccattctgtggccatgttggatttttgatagagacaaggtgtcaccatattggccaggctggtctcgaattcctgacttcaagtgatctgcccgcctcgacctccaaagtgctgggattataggcgtgagccaccacgcctggccatatggccatatttgggataagttgtgcactactgtggttgactgtaatgcagtcctcagattggttcacttagggaaatactttcccaaccatgttctaggacagacttttgtaaagtgaattaaatgttcttttgactgccatttaaattcctatgtgtgtacataaaaatatacatatatatacacgccattttttaaagagatattgcctagactgggcctgaactcctgggttcaagcaatcttctggcctcagcctcccaagtagctgggactacaggcacatgccattgtgcctggtctatgcactttttattttggagtaattgaagactgaagactctcaagcagttgcaaaattagtacagaagaaaaaaaatagtgcagaggattttcacccagtttcccccaatggtaatgttgattgaacttcaccattgcacatcattaaaacaggaaattgacattggcacaggactgttcgcaccaacactgaccacgttcggatttcaccagcgtttccatgcatgcctgttgttgggagtgtgwgatgccttgatcactgtatttttggaactgcattccacagcccctgttgtcccttcttgttctggccctccacagtggtgaagaagggagttttacrtagcccaggcactcactttgtcatgccatgtgacatgctttgcttcccccacctgcattttcattgaggactgggcagaaataaattgggggagatgtgtgattctctctcactckctgttttcccycctttctggtccagatcatgtttcactccttcggcaacaagcaagggcsccagcacgggatgctgatcaatactscctacgtcaccaaggatctgctccaggccaagcgattccaggcccagaccctgggaaccacctacatctatgacttcccggaaatgttcaggcaggcaagtccggcggctcagacgcggtaccccctgggtcctcccagcagactccaccagaaccaaagcccatccttaattctccttctaaagacctagtctaaaggacaaggtcttgccaggtgcggtggctcacgcctataatcccagcacttcgggaggccgaggagggaggattgcttgagcccaggagttgaagaaccccatctctacaaaatatacaaaaattaaccgggcgtggtggcgcatgcctgtagtcccagctacttgaaggctgaggcaggaaggatcacctgagcctgggaggtcgaggctgcagtgagccatgatgtcaccactgcactccaggctgggtgaccgagtgagaccccgtcttcaaaaaaaaagaacaaggtctgcattgaagaaaaagaaatgaatgtgttgagaacgacttcatagtatttttctccaaataagactaatttatcccaatgataaaagtcataggatatagaaacttcagaaaataaaggaggttggaacaaagaaaaaataattcctagtcccacactctgatgacaaattgcttaacattttgatgtgtttccttctggtctttttaatggtcatttattaagtacctgctacttaccaggcaccattcgaagtctagacagctgtgggaaagaggagggggtcactgccttgagtaatttttagtctactcttaaaaaataatgttttgggttgggcacagtggctcacgcctgtaatcccagcactttgggaggctgaggcaggtggatcatttgaggtcaggagtttaagaccagcctggccaacatggtgaaaccccatctctactaaaaatacgaaaattaaccaggcgtagtggcaggcacctgtagtcccagctactcgggaggctgaggcaggagaattgcttgaacccgggaggtggaggctgcagtgagctgagatggccccactgcactctagccctggtgacagagcgagactctgtctcaaaaacaaaaacaaaaacaaaaaaataatgttttattatgtttttctgatgattaaagtatacataggaaactatggaaaggtaagaataaggaagtaaaattctattcatatgtaattttcccaccatcaatgcctgaaagaacatttgggtgcattttcttcaagtattttttatgcctttatatgtttatgccctaggggctttaaaggagcctgaaccactgacattggtgatgtgaatgtctcttcattttccaggattgctttggaatgacattatatatatatatatwttatttatttatttatttattatactttaagttctagggtacatgtgcacaatgtgcaggtttgttacatatgtatacatgtgccatgttggtatgggatctaattaaactaaagagcttctgcacagcaaaagaaactaccattagagtgaacaggcagcctacagaatgggagaaaatttttgcaatctactcatctgacaaagggctaatatccagaatctacaaagaacgcaaacaaatttacaagaaaaacaacaaccccatcaacaagtgaatgacgttcatgaaaccaaggtcaaggaccttccagtgtaggcaggaagcatctgttcctacctctgcctatgcctcatgcatagaggatatgaaagagtaggaaaagctgctctttagagtaactcgggcctcagctcgaatgctggatctgtccccttgcttcctgctgtccctagccaagttccttcacctctctgggcctcagtttcctcttctgtaaaataagaataataacagtacctaccaaaagttgttggaaaagtgtatgtattcagtgggcgcttaataagtggaaacttatgattaagaatgtcattgtctgtatccttttgcctttgacctcaagagctataagggaagaaacatgactgaaccagaagcaaatccatcgtctcttttttagataaatccattgtctcttttttacaggcatgagccaccatgcctggctaatttttttatttatagtggagacagggtttcactatgttggccaggctggtctcaaactcccggcctcaggtgatctgcctgcctcagcctcccgaagtgtttggattacaggcatgagccaccacacccagctgtctgtctgtctgtctgcctctatatctatatctatgtctatatctatctatttatctatctatctatcgagagaatggaaaactgaacagcagaccagagctaaatttatcaatatggataaatctctcaaacaaagaggagtagaaaaagtaatttgctgccgggcgtggtggctcacgcctgtaatcccagcactttgggaggctatggtgggtggatcacctgaggtcaggaatttgagactagcctgaccaacatggagaaaccctgtctctactaaaaatacaaaattagccaggtgtggtggtgcctcaacccgggaggttgaggcaggagaatcactgaatccgggaggcagaggttgcrgtgagctgagattgcgccattgcactccagcctgggcaacaagagaaaaaaaaaatagaaaaagtaatttgcggaaggatgtgtacagtgtggtactctttatttaaagtttgcagtgcaaaacgataytgtatgtttccaatgtatgcatacaggataaaggaaaatgaaaaaaaaagcatgcataggactgggtaggcactgaattcaagggaatggtcacctgtgggttggagttgggaggaagaatgagctggggcttcaatcgcatctttcttctttctttcaaaaactttaaacaactatggaaaaatcaagatttgacagagccactggatgggtgctcatatttaaatatgctttaaatatttcatgattcaaaaagagagagtgaactacagaattcaccctggaatcatgacagatcatctctgtctgggaaagatagttcttccctactgatgacttcaagttttttctctttcctcttctctccccaggctctctttaaactgtggggctccccagacaagtatcccaaagacatcctgacatacactgaattagtgttggactctcagggccagctggtggagatgaaccgacttcctggtggaaatgaggtaatagctcagcggagcctarcccctggctggagtcacccccttaaaaatatttttgggccaggtgcagtagctcacacctgtaatcccagtgctttgggaggccaaggtgggtggatcacttgaggtcagaagttcaagrccagcctgggctacatggtgagaacctgtctctacataaaattttaaaattagctgtgtgtggtggtgtgctcctatagtcccagctactcgagagactgaggcaggagtgattgcttaagcccagaaagttgaggctgcaatgagctgtgattgcaccactgcactctggcctgcgcaacagagcaagaccctgtatctaaaaaaaataataataactaaaataaaataaaaagttttcccccaaagaaacaaactcattttccttgtrcattcatccccttgccaggtgggcatggtggccttcaaaatgaggtttaagacccaggagtacccggaaggacgggatgtgatcgtcatcggcaatgacatcacctttcgcattggatcctttggccctggagaggaccttctgtacctgcgggcatccragatggcccgggcagagggcattcccaaaatttacgtggcagccaacagtggcgcccgtattggcatggcagaggagatcaaacacatgttccacgtggcttgggtggacccagaagacccccacaaagtaygtcgtgaaactggcggggcagggtgattctgctcagctactactgtattttcagtgggagtgctagcacctgcaagaggtgaaaaaaatctcacttatgtataaagcacagatgtacatgtagtgtataaacaggcatacagtgtatcagtgatactaacatttcactgtggcgggggggatggtgatgagaaaaaaaagatctaaaaaggctccttaacggggataatgaaaaaagtctataaaccctgagctgatatacactgagcgctcctgaatgcagtgtgcactgagaatgcagaggtgattgtgtcaactccctggcctcatagcgttcttagaattatggctcacacctgtcatcccagcaactcaggaggcttgggtgggaggatagcttgaagccaggaattcatgaccaagctaggtaacctaggcagcatagccagacttcgtctctactaatgaaaaaactaggtgagcatgatggtgcctgcctgtagtcagcctcagctacttgggaagttgaagtgggaggatcacttggagcccaggagttcaaggctgcagtgagccatgatcatcataccactgcactccagactgggcaactgagtgagaccccccatctcaaaaaaaaagaaaaatctttggggagttgtatagataccagcttgccataaaaggcaagatgaatgagggaagcgcacgcattctgtgatgtgaaatgacaggggacagtcatcctttccattcagagcatgcattctcgggggcgatattgcccactacccccaagaagacagaaaaataatttttggggtggcaataaaataktttttaacatatatacatatacrgagtatgtaaatagtggttaaacagtgtatcttgaaaattaaaatttcatgttggggtgctggcaataagaaataaaaatgagatagtccttagaggagagcttagctcaaagcagaacttcagtttatggctgttattaatacggtatttacatgagatgtgttaatgtgtcattgacatgttactaacatgttattaacatccatccctacratgttcacattaagaaaaaaaaaacagtggctttcagtgcagggaactggattcgtagcctcactaaagtattttttaagggatttaaatacctgtacctgactccccaagactacaccagaatcagctccctgaactccgtccactgtaaacacatcgaggaaggaggagagtccaggtaaataacttatcaggtagctccttarttttgctcntggttaatttcagctgtcttctttcctcggggcttgtggcgatattttccagtggggtggtggtgtttgtatgatgggaaccaatgcctgttgggggcactgatgccttaaacatttgttaaactctccaaggtgagtccatccttgtcattctaaaatgagtgactcctttcacaaaaaatagcacgtcatgtagggagaatgagattggattctcgtgaatctcctaggagccgcaggctcacattttgtgaccaaactgatgcagcggtgacttggcaaactgggaaggtatgggtggggcagagagaggtctgttcttcgagagcattcaaaggctactatcttttccaggacaagttatgtttttctcagtgggattaactgactcaggatttcctagactgggttttttgcaatgttagtgacaagctggggggaaattccatagtcagatgagtttgggaaacactgggttaaatgagatctcataaacatctttattgcagaccttcttagtacctgtagcatgctgtattagtcagcgttctccagagggacaggactagtaggatatatgtatatatgaaagggactttattaaggagaattgactcacatgatcataaggtgaagtcccatgataggctgtctgcaagctgaggagcaaggaagccagtagtggctcggtctgagtctaaaagcctcaaaagtagggaagccaatagtgcagccttcagtggccaaaggcctgagggcccctggcaaaccactggcgtgagtccaagagtccaaaggccgaagaacctggagtctgatgtttgagggcaggaagcttccagcatgtgagaaagatgaaagccagaagactcagcaaggcagcttactccaccttctttcacctgctttttctagccgcgctggcagctggatgactggatggtgcgcacccacattgaggatgggtcttcctctcccagtccactgactcaaatgttaatctcctctagcaacaccctcaaagacacacccagaaacagtactttgcatcctaaagttgacacttaatattaaccatcacacatgctaaagtgcattgtgaatctctaacagaggctggcgggacagtgtttctcattatgtggccctggaatttttgattgattgattgtgaaygggtttcctctgtgtacccccatctctctgtagaccgttggaggaatatgggccgagggtsatatttcactgagacagcccctgaacaggcagatatctttggttgtataaaccaaaaagtatctgagacaggtctcaatcaattgagaagtttattttgccaaggttagggacacatccagaagcaaagaacacggaatcatagaaaccgtctgtggcgtgtrcctttcttcaaagatgatttggagggcttcagtatttaaaggagaaaagcaggctggaggggaaagagggaagttctggtaatcacatgttgcaggagaaaaggcgcaggcaggggaagtcagttatgtattcttcctgcgctcagtaagtcagcactttctataagataaggtggacatagaggaactacctgtggagatatttcagcttttatctgtatctatctgcttactaaagaaacaaaaggaaaggcagcttgcacaactcagcttcagcttaaattgttccttttggcattgtgaatcgtggtcctagtttttattttcctttcacagatgggagcagtgtgatgatttatttatttatttgagacagaatcccgctctgtcacccaggctggagtgcagtggtgtaatcttggctcactgcaacctccacttcccaggttcaagcgattcttctgcctcagcttcccaagtagctgggattacaggcgtgcaccaccacgcccagctaacttttgtatttttagtagagatggggtttcgccatattggccaggctggtctcaaactcctgacctcaagtaatctgcccgcctcgtcctcccaaactgctgggattacagagcagggtgatgattgttgatgctgcacttgcccttttagaaatcttagcactcattttgagggttctagatgccaatttcattttgcctctggatgctttgtctgcttccaatctctcaccttgctgcccagtcagtcccttcttgggaaatgcatccaccttggattttttggggctagagcccagcctttaacctgtgcttgcttttgaagatacatgatcacggatatcatcrggaaggatgatggcttgggcgtggagaatctgaggggctcaggcatgattgctggggagtcctctctggcttacgaagagatcgtcaccattagcttggtgagtcttcttctattttctcttacttttcaactttccattatagaaactttaaaattgtcacaaaattagagagaatcaataataagccccatgtgcccgtcacatacctcctacagttaccacatgccagcccactgatatttcctcaatctcacccccatcccctgcacctgttttagagtattttaaagccagcccccatcatgtcttttcatccataaatacgtaagggtagatctttaacagataatgactctcaccctcttcccccrgtttttaaaaacataactgaaatactaatattacacccaacagaatcagcaatatcattgaaacccagtgtggtttaacagttatctcaaaatacccttttctagtggtttgtttgaatcagggtccaatctcatcttattttcaaggtactgaatgtttagaagaacttttctctgactttaactggcatataaggagtagtccccatcccatccccatggcctttccaaaaatgttttctgtttctagtagtagtactactgtagtagtagtagtagtactagtagtaattctagtactagcagtggtggtagtagtggtggtggtagtagtagtagtggtagtagtgtttgtggtggtgaatctgtatgggtctaaggcagagtgagagaccgaggcaagtytctcagcaggagtgaaagtttattaaaaagttttaaagcaagaatgaaatgaagtacacttggaagagggccaaacaaggcaacctgagagatccaagtgcctcatccaacccttttgaggttttatgcattggcatgattccagggtttgtgtttcttctcccctgattcttcccttggggtgggctgtctgcatgcacgtggtctgccagcacttaggaggggccgcatgaacagtgtgtttactgaagttgtgtgcatgctcacttgaggctttcctcctttaccagtcgagtgttcctagaagaagggcacggtaccagataaactctgccatcttacctcttagcatgcatgcttgagcccacccacccagctcctgagatcttatggggaagctgcttatcactagcttcaggtgttttctatctatcaggagattgcctttccctggagscagctgtgaccaatattaattttagagagacactttagcaactgcctaactatcacctgatggttgccttcctctcctgccctgctcatgtctgcttaactacctactctaacagcagcagcagcaggaataatagtactctttaatgataaactgccttggaaggccttatttgtacatgcaatgttgaatcttcagtttccaagtggaaaatgttggtcataagcatcttccttgggcttgttttctagattatatgtatagtctttttattttgaagtcatctaggacccaccgtaagttataagatactacagagaatttccaagtacccttcacccagcttyccctatggtacttacataaccgtagtacattatcgaaaccaggaaactgacattggcacaatattgttaactcagtacagaccttattttgaatttcaccagtttttacatgcactcctaggtgtccttttggttgttaagaggctgcaatggcccatgaatgcccaggctcagaagagctgcacacaagcctcttaaaatctgaaacattcactgtctgctgcttgtctttacagcaatctttgttaaccatgttatttccagataggaatccaagctcaataaagtggcctgaagaataggcttttgcctctactgtggtttggctccaaatygggttgccattggtcaaaacataacttccatttggtcccagcaggttcctggactcttccctgctgtggggggtgggtccctcgccactctccagaattcagagggggtcctctctccacaggtgacctgccgagccattgggattggggcctacttggtgaggctgggccagcgagtgatccaggtggagaattcccacatcatcctcacaggagcaagtgctctcaacaaggtgaccaaaaaggggcctgtgcagagtggatccttgggggccaggagtcattttaacattcccattggtctctggtgggggatttttctcaatatgaagccagtttcattcctactgatacaagagctctttttttccaatttgcagctatctgggtccttatgagaaaaaaaaaattagttttaggcaattctggtcgatctaactccctgtattactgacattttaaaacaaattattgaagtgccattacacattgcagaaaattagaaaaggaaccccccaaaaaagtaattttgcagcttctatcattctggtatagttccctctcatcttctgtctttatgtggttwatttatagtgaatatgcagttttgtattctacttttttcactgtattaaaacattttccttgttgaaaagtctctatacttaatgtctgctcaaatctcagccaaagtctcaaagcctggttcttgaaccaacagcatcagcatcagatgggaacttgtcagaaatgcacatcctcaagccctgctgcagacctgctgaatcagaaacactagctagggttttgcttttgagatggtcaaggtagaagtcagctgcatcaccagttctcaaattggcctgcatattggaattatctagaaactaaaaaacaaacaaaacacaaaaactaattcctcgaagattctgatataattggtctggatgtagcctgagcatcaggatttgtgaaatctcctgggtgattctaatgtgtagccaggattgagaagcactgagatgatttccaaacaggtggtagagccctgcaccgtgcaggacattgctaaccatgttgtgtcaaagcaggtcctgggaagagaggtctacacatccaacaaccagctgggtggcgttcagatcatgcattacaatggtgtctcccacatcaccgtgccagatgactttgagggggtttataccatcctggagtggctgtcctatatgccaaaggtgcagtactccccctgcagcttagaacctggaaractcttattaagctcattggctaattctgtccctgtcacctcctgggtggtgtgggaggctgaggagcaggaagcactgcacatgtggctggggttgatttttcttactccttcttccttctctgatgcccagccctgtactaggtgtcctttgctcttttggtggcactaatgccattgtaaggatgctatctgttaatcctttagaaagaggtagtattgcctcttgacaagaggcagcattggacaatactgagtctttaagctttacagtcaggctggatttgattcctgccttcctcctcggtagctgtaagacactgggagagtccctaagtttttctgagcctgtttcctcatctgtgaaatgagaataataatagcacctaactcatggtgttatcatgatgattaagtgaagtgatatttaaagcacaacgtttggtaggtcctcaccaaagtaagaaggggacaatcgtgggcacagttcttggttaactgtaacattccttacaaatgagtgaggttgtcattcttcattataaccatttctgagaggttgggtttacagagttcaggtcattccagatcttctgccaagaaccccaagtcacaaatgtcagtttgtattcccaagtgccccttttccccatctgcatgccatctgttaccaytctctgcaaccaatctctttttctttcttttaagatgtttttcctcctatctgaccatatatagcagtagcaaccctttcctgcgtttctgtaacttcccagcatcagtgacaccatctgaaccgggaagcacactcaggagttcataaactagatttcagaagaatccatgggatggccagtccttatctggcattttccaatcagagcagtggcttcaggagccctagggaggggatattgctgcataaccaggcataatcatagtcagaggagcaaagtgctgatcagaggtattattgacaagcaccacagactragtcagagacttggctttcttttttaggataatcacagccctgtccctatcatcacacccaytgaccccattgacagagaaattgaattcctcccatccagagctccctacgacccccggtggatgcttgcaggaaggcctcacccaagtaagttctaaagtattttgcctaggacctggtctcgggtttctttctagggcttgagacaaaggagcactttgtctcaagcgcttgagacaaaggcttgatattcgttctcatatcccagagaggtatacctgaaatcaaatgcagggaaagtagagaaatggagattttactctaggcttttcctgagccattgaccaagaaggggtggaaacagcctccagtttctggagctaatagatggaggtggggtgcaatggtggtcctggtctccctcccctgatgctccatgctccgtggtctctaactgccccactgtctcatcagtagaaaattcagtgctgaaacatcagagtttcaaagagaagactgcatctttctctttctttctctcttacaaaggaactctgtgagtttacacaggataggcaatctggtctcctcttctttttttttttttgagacagtgttgctctgtcgcccaggctggagtgcagtggcgcgatcttggcttactgcaatctctacctcctgggttcaagtgattctcctgactcagtctaccgagtagctgggattacaggtgcctgccaccacacccagctaatttttgtatttttagtagaggcggagtttcaccatgttggccaggctggtcttgaacacgtgacctcaagtgatctgcctgcctcagcctcccaaagtgctggaattacagacatgagccaccatgcctggccaattttacctcttctatacctacacacacacacacacacacacgcacgtggacacgtgaacacacatgcacatgcacacacatttttgcacacacacattctctctctgaaagggatgagtttctctcttggaggtatattatttcagtctgagcaaccagaacacaacaggaaagttgagctgctcccgtcactatatcccaaatctagaatttcacatgctgctacctttagacttggctgctccttggctgtgcaatgcaggagaggtgaccctcgggagtgtgctagactccagccagtgcaaggagtcctgtggcttccttctcttgcttttcatttctcttgggctttctggcctgtaaacactgagggggctgcttatctcaattaaaaaatgttcggcttctcactgtcaggccagtcctcggcagatgctgaagctgtgctgttgcatgcctgggtgccgggcctcccatgcctgagatgcctcttactctggctgccccctcctggtcagagccacagccatttacgctgttgcatggatttaagtcatcatttcttccccaccaatggctgtcattgacatcatcatattctctctctgtctctctgggaaattgaaacttttttcccaattaagtggttatgaagctgcagccagcagctagcaggtgagggatgagtttttcgggaaaggtggtcccttcctaaaatcccaccttctggaggtgtctgtccactctctgcatcttaggaagagaaggcagagaccatgattagaatctatgtgtttggagttggctggctgttgatggtagtcacatattccatacagactgaattcttgacttggtatatttattgcagccctgtttgtcttttgaggcattttgggaaggagggaaggggttgggctgtgtggttttaggtagaaaggggtatctgggctatgaggttaaagccaggctgtccttagggagcttttgcacagccaggagtgtcctgggggcccccagccacctggccctccagcctgggcttctgcccttctgtccacagctctgaagggaacgtggcagagcggattctttgaccayggcagtttcaaggaaatcatggcaccctgggcgcagaccgtggtgacaggacgagcaaggtaatcatgaagacgggagcaggctgcccatgtctgactcaccaggcattggggccccgaggtgtgaggccagggacctccaggggcaattttcttcttggcctcaggattttctaaaagaaaaaaccaatttggggaatgatttctgcagtgtctgtgtgtgcccttagaaggtatctcagccagcctcctcctgaggcctgggaccctgtagtcagtccccaggccacaagggctaacaacccctttgggcatcagaaggtggccttgggtgctctccccagaaaacttcacagacactggcactctgaattccatcttargagagccatggacaggagccctgttgtatgccactgttggtgggaggctgcaatgcttgcatgctttccaagctgggcagctcacccttcagccttgtagctttcatctctttggacagctccacctgcctgaaagttcctccttataatgagccccgagctccctcctcatcatttaccactcattcctggtacgatgtcgcagctataagtccaggctctgcattagacctgaggccaagccccatctccatcactcaccctctctggtccttcacatctgtaaaatagggataataattctaccccaaaggattattgtgatgattagatgcaataacatgtgtgaaatatttaaaatcgacatactccataagtgggaatggctgctatcatttacatcttcggcaataaatactaaagtgcagccagggccgggcgtggcagctcacacctgtaatcccagcacgttgggaggccaaggcgggtggatcacctgcagtcaggagttcgagaccagcctggccaacatggcgaaaccccgtctctactgaaaatacaaaaattagctgggcgtggtggcaggcacctgtaatcccagctactcggggggctgaagcagcagaattgcttgaacccagaaggtggatgttgcagtgagccgagattgcgccattgcactccagcctgggtgacagagcgagactccatcttcaaaataaataaaataaaataaattatatttttaaaagcaaaaaataaaaaaaaaaaaatccactccttcttccatgtgaaaacactttgatttgaagactgctctcccccacccctgcatcatagggtaaacgagaaccatgtagtgatgcacagttcagtagcaagtaactgatgtcatggcatcccctgagctgagtctctgtccagttcaatatccctcagccctttccaagtgcaacttgatgtctagaccagtgtagtagctgctggctacatgtgatgctttagtttcattattattattattattttgagacaaggtcttgctctgtcacccaggctggagtgcagaggcatgatcgctgttcactgcagccttgacctcctgggctcaagcaatcctcccacctcagcctcccaagtagctgggactagaggtgtgcgccaccacacctagccagtttttttattttttgcagatacagggtctcactatgctgtccaggctggtctcaaactcctggactcaagcaatcctcctgcttcagactctcaaagtgctgggattacaggcataagccaccatgcccggctccttcagtttaaattgaactaagtcaaagtgacagaggatgacctgttccattcctcacacttgccacgttccacgtgcagcccacagctcctgtattggacagtgcagatggagaacgtggccctcgtcacagaaagttctagtggttcatgctgctccaggccctataccatcccagccctcctctgatggttcttgcctcaaaaagggcaccrataggtctgctacctttcgaggctcttaccatttgggggctttttctttgccttccaataaaataatccgccagattaaaaagagcattctcctccacgtgccctcacccccacacccagaggtccccaaatgcacctggggtgctgcccagggcctggctcactggtgctcattttccaggcttggggggattcccgtgggagtgattgctgtggagacacggactgtggaggtggcagtccctgcagaccctgccaacctggattctgaggccaaggtgagggggccgggagctgtggctgctggtttagccagcggtactgtcgagagtgggtcctgggcrtgggggtcccatccctgccctgccaacttaggtggagaagcaggggacccagtgcagtccctggccctggggggctcagtgcctgtttctctgacactttctctatgggttgcataaatggctgcaccatcttgcttcttcctcagcagatgataaaggtccctagaaacccctcccacctcctgccctgcctctgttgctgtttctgcgctaggccagggcacagactgagaagagctcaggagtcaagagggctgggttccagggccggctttaccccaactcagtgtgaccttgacgagcttggcacccctcggagcctgtaaaggagggcaacgggaaccttgctgggctgcaatgggagggtcagcctggtcctgagcggaggagatggggcttccatccttctgagccctggctctggtgctggggccagcacagatcagatcgcctgccatccagagcgaggttctggcagccgtccctctgtcctgggttgtggttgtgcagagacatctgatccccgcagctctgtgttccagataattcagcaggcaggacaggtgtggttcccagactcagcctacaaaacygcccaggccrtcaaggacttcaaccgggagaagttgcccctgatgatctttgccaactggagggggttctccggtggcatgaaaggtaagcccctccctgcctatgttaccccaaagccttggggtcagcacccaggacagcaccctctgggtggtgatgctaatgtcstagtctgtgcccatcatcatcttagctgtgtctcccaacaaccctgaggagaaaatattgttcaggtgccccactaccccgttttaaagatgaggaactgctgggcacagtggcagacacctgtaatcccggtgctttgggaggccaaggcagaaagatcatttgaggccaggagtttgagaccagcctggggcagtatagcaagaccctgtctctacaaaaaaacaaaataaatgtttaaaaaattagctgggcatggtggcacatgcctattgtcccagctatttgggaggctgaggtgggaggattgcttgagcccaggaggttgaggctgtactccagcctgggcaacggagtgagacccccatctcaaaaaaaaaaacaaaaaaacaaaaaaaaaacaatgaggaactgagggttggaggcaaagtgtcactttctagaggtcacaccatgaggtgcaggtcagggaggggcagccccaggagctgccgggtgacctgggcaggcacctccccatttggcaaggtgaggaggatgtttgtccacccttccctctgcagaaagctgctctgagcctcatgtgaccttacaattgtgtgagggctttttaagccaccaagcatgttttgggagagagtggctgttggatcactggggtgttgaggacagagctggatgggaggcagacagacctgctgtgagtccttgttaactgggtgacatcactgagcctcagtttccctcctttgtaaaagggggttaagaacaggaccaacctcagagggccgaggtaagrgtctgatgagctaattgctgacatgcagtgtgattgtcagtgctgttattattgcattcttgttttcatgtagggtgcctggggacctggagagatgtgtcttggtggaagataagggccatgttgcccatgcacattggggaaggatcagtgtgactgttagtgagggttttctttgctggaaatggtggggcagggcagggacagtcatgggtgagggcatttcaattccagttggaaagaatcctagagattggtttttccctgtgccttcacagatgaggccactgaggcccacactgggtgaatgacctgttcgaggtcacacagccacttagagagtgatcagtactctcaaatcccagcccagtgctctccaagcctctcagctgggctcactctcccaggacccccaggacaactagggcagtgggtttcatgtgtggatgagtgagggccctgaactgggaggctgctttgcttttcagacatgtatgaccaggtgctgaagtttggagcctacatcgtggacggccttagacaatacaaacagcccatcctgatctatatcccgccctatgcggagctccggggaggctcctgggtggtcatagatgccaccatcaaccckctgtgcatagaaatgtatgcagacaaagagagcaggtgggtgtgttgcccttagcctggcttagccttttcttgttctcccagccttgagagcccatgaccttgggagatcatggagggatgcagtggctggaacctgaaagtggtggagaaatgttgtctcttctttcatggtttccacttccccttcccaaggaagtttgcaatcaaaaaataaaaaggaaagaccaaaagcacttgaacttcctggcagccaggatgaaaagggaaatatgatgagccatttatctctcattagactctgagctatgagttcctataggaaatgttttattcagttttatatcccagggtctagcacagtgccttactctcctggtaggtggtcagaaaatactggctaaacaaatgactgaatgaatacttgcatgagaggataccggttcttcgcgggagaggtaacctccttggcactttccttaggaggaatttattccagagattcttacagaaaggatgatgacaataatgttcacagcacagtgactgatgactttgaagtgaaaactacatgctacacaggatgtcaaggcctcaagagtcattctactccaaatataggcacggcattcctgtgttcactccctcattcatttgctaattcaatgaatatccattgattacctcactgtatgccagccattctggtagacattatgatatggtggcaaatgggccaagcttgtcctgcattcagggcacttagacccttgttagggactgctgaggtcagtcctccaggaagactcaggatactgagcagcacttgaatggagtcattgctaacttttcatgctggccaccaggaagctcagagctactgatagcattcttcagggcttctaagctgtcaaaagcaaaagggggcagggggagaataaggggtaaataaaaatgttggaaatgaggccaggcgtggtggctcacgcctgtaatcccagcattttgggaggctaagggsggcagatcacttgaggccaggagttcaagaccagcctggccaacacagtgaaaccccgtctctactaaaaatacaaaaattagctgggcatggtggtacacgcctgtaatccaagctgctcggggggctgaggcaggagaatcacttgaacccgggaggcagagattgcagtgaaccgagatagtgccactgcactccagcctgggtgacagagtgagaccctgtctaaaaaaaaaacaaaaaaaaaaaaaaagaaagaaaagaaaatgtatgttggaaatgggaggacagctcacacaagactacactgggctctcaaggtgcttttgtgagatttaaagcgatcagaaacagtgcccctcctctaggagggcagaaattagcaaagttagagaggactgtggctggagagcaggagggttatgctgccatggaaaaagtcgtacactcttagacctgaaaggggccctccagagttcagaaagcattattttaaacagttggctcagtctttccatctgtgggtaaagatacagaggcccagagagggaaagtgacttgtctaagggcacacagcatgtgtgggggtaaaagagctgaggactgacacccagatcttctggctctcttccctccagctccccccacatccattagcccttgcttgctgggcaatgcctcatatacccccatccctgcctcttctcttttaaggggtggtgttctggaaccagaggggacagtggagattaagttccgaaagaaagatctgataaagtccatgagaaggatcgatccagcttacaagaagctcatggaacagctaggtaagggggtcccaaaggcttcacctctcagaggtcaagagaggcccagctggcccactgctgggggtttctaggatgttmaaaataaaatgaaaaaataccaaaatacagctataataactgtgagatttttaaagatattcacatttgtctgtttgttttgttttgtttttttgaggtctggctctattgcctaggctggagtgcagggtgcaatctcagctcactgcaacctctgcctcccaggcataagccatcctcccatctcagcctgagtagctgggactacaagtacgcaacaccatgcctagctaatttttgtatttttgtagatgtggggtttcgccatgttgcccaggctgttctcaaactcctgggctcaagcaatccacctacctcagcctcccaaaatgctggggttacaggcatgagctaccatgattggaggacattcacatttctaaatcaacctttttaacattttatatatatatatatatatatatatatatatatatatatatatatatatattgccatcgtgaatttatttctcagcatacacaaaagatagcaattgaagtatttggggctgatggggattatcagaattttggtggcaaaatgttcctttagaattcccaatcagagataagatattttactaattttgtttgaatgacagctttgttttacttgtcatctttagatgtaattatctttatttatttatttgtttatttttgagacagagtcttgctctgttgcccaggctggggtgcagtggcgcaatctcagctcactgcaacctctgcctcccaggttcaagcgattctcatgcctcagcctctcaagtagcaggaattacaggtgtgtgccaccacacctggctaatttttgtgtttttagtagagacagggtttcaccatgttggccaggctggtcttgaactcctggcctcaagtgatttgcctgcgtcagcctcccaaagtgctgggattacaggcgtgagccactaagtctggccacaagatgatatttaaatatccattttaagtgtcagtgtctttataactgtgctattcacaagattttttacagtgtgtgcgtgtaatttctttggctggtatcagggtaatgctgatctcatagaatgagttgaagtgttcgctcctattttctgagtttttgcagaattggcattatttctttatgtttttgatagaggtttttacctataaattcaacttctttgttatatataggactatttgtgttatctgtttcctcctaggtgagctttggtggtttgtgtgtttcaaggaatttgtctatttcatcttaagttgtcaatttggcatagagttgcttataatattcccttatcatattttacaatgtgtactaaaaatcattgatatagtatcctacaagcacgatgggtctgatggaaggggaaaatgtagagttgcatgttgaatgctgtcttgcaattgtgagtgcatttctgagactgtactagctatttgatctgagacaaagggggccatcaagatgggcctggggtgggggccaggccagtggactctgggggacctagggggctgagggcagcctgtgtagcagcaggggtaatatcagagttaaagctcagacctctcacaaggcaaggcctgtcctgcaaatcctgatttgtgccttcttcaaaaaaaaaaaaaatctccaccccatcacatatgaccagcttccatggcttgactggcctttctgctcacctgcaggggaacctgatctctccgacaaggaccgaaaggacctggagggccggctaaaggctcgcgaggacctgctgctccccatctaccaccaggtggcggtgcagttcgccgacttccatgacacacccggccggatgctggagaagggcgtcatatctgtgagagccacagctgccgtgtagggtgcaaagagcccaccctgttttccaaaacatggaggacatttgggctcgggggcggggagggcggtggtggttgggatgggtcaaatgctgcaggaggtgggagtcacctgggaactttaaaataatcccgatccccaggtggcactgcagaccagtgaaatccaaacacctggatggaagccaggcggtcgtattttttaaagatccccaagagattctaataagcagcaaagttcagggaccactagtctgatggctcggtcagtttggacctggaccaggggtagaaaccgttgttcctgtccagcattcacccacccctcaccattgcaaggactcccacagtcacctcctacccatgtccagtgctcattggttctcttgctgcattgttctccctcccagctgactcatgcctcacacgagcctgtgtttgtgtcggttgaggtagaagtgggtgccaggtttttatgggggacattttttcaactatggccagtctggagtcctggtgacgtcctgcctctgagcaggtgccttctcctccctgagcctcagcttacttgcctgggatgatctgggaatgatctcagagcctgggcccagccccgggcagccactgtcatgggtgtggtcagagccagtgtcccgtctcctccttccctttccggggattcaagcctggctcgtccacaggacatcctggagtggaagaccgcacgcaccttcctgtattggcgtctgcgccgcctcctcctggaggaccaggtcaagcaggagatcctgcaggccagcggggagctgagtcacgtgcatatccagtccatgctgcgtcgctggttcgtggagacggagggggctgtcaaggtgggcctggggtgagaacgaggccggtgagcacagggggtgctgggggctgagacagctggcccacagctgggtccctctctgaggcatcctctgccccctccccaggcctacttgtgggacaacaaccaggtggttgtgcagtggctggaacagcactggcaggcaggggatggcccgcgctccaccatccgtgagaacatcacgtacctgaagcacgactctgtcctcaagaccatccgagggtgagtggccaccgcacctgcttcccagcctcctggcaaggacccgagcctggattgacccctagctacccgactcctatgcagccacttgaacccgccaccctgtgcagtctggggttgtccccrccccctccccgctccccagcaaagagaccacactccctaatgtcgggtctcccagcacagtggctggggtgggacagagagcctagaggtactctgaaggccgtgtgagatgcttccaactcatgaaccttgctggaatatggacttgtccaaagtcacagctggagcagggttggtcacagaacccacatttggaaccgctagccttcaggctgctgtcttccacgccagtgttgacctttccagagggtcccctcccccaattgccatggggtcaccccgtgaaggagggagtcgagcacaggggaccccattttggggatgaagctgagactcaaggcagtgtcttgtctcaggtcatgtcacaaagcagtgaccagtagggacggtggtgcctcaaggcattctgaacttcaggtcacagcccctcctgctgcacaggaccatcacccccatggggaccacagcagggactcgggagctctgggttctggggtgtggccccacacaaggactctgccacccttggggccactgaaaaagtggctggagtgatcccagccctcctctcacctcccccacagcctggttgaagaaaaccccgaggtggccgtggactgtgtgatatacctgagccagcacatcagcccagctgagcgggcgcaggtcgttcacctgctgtctaccatggacagcccggcctccacctgaccgtggcccrcccagccactcccgggaccacggcaaaaggaaccacccagacccaccacccgtacaccctcagcagaccctgaagacttgcttttaaacaaagaaaatcctgggcacttctgcagggctgctggttccgagctgacacccgtcttaayaaaaggcccaggagtgcctcttccaaacaaaaacagcctcctctccatagctgggaagtttattttgttttgtctctgaagacagcagttttattgcatcactaaatctaatcaagctaaaacatccctgtttccttttgcaaaacagtgcctggcatgtgggatccaggcgttctttaggatccttggataccacatcgtgaaatcttttatttttttactctgagaccagcaccagatgtaagtaagcatctcatatatttcagccaaataaatgggccaagggaaaaaaatatatatatatagacaggactagagaaaacctatttttgtaatgatgtttctttggatactgtctagtcacccagaaaaatgtatggatgaattttttttttttttttttgagacaaagtctcactgtgtcatgcaggctggagtgcagtggcatgatctcactgcaacctccatctcctgtctcagcctcctagataactgggattacaggtgcccaccaccatgcccggctaatttttgtatttttggtagagacagagtttcaccaggttggtcaggctggtctcaaactcttgacttcaggtaatccacccaccttggcctcccaaagtgmtgggattacaggcatgagccaccatcttcagccagatgatttttttattgagagagtgaaatgctattttgttccccaaatggcgctagtgaatcactaggagggtcccactgataggccatgtttagcactggttgccagggattctctttttgagagagggaaagcaaaatgaatggaagtacccagctggaggtttcagggcttctggaggatgctctcgcatagctcgaggtcctctgcccacctcttctctccaaggaaaatgaggactgccccttccccctgcaggattggcccccagcctgcgcatgcaccctcctcttgcccaagtggggagcacagaggcggagaggaatcccttaccacacccacggcccagcttgctcacgagtgtcacctctgtgacggtcaccactgctcccttggagggccacttgagttactgttgcttcctcgcctgctggcttgatgagcaccgatggtgggatctgaccccgaggggcagagctgtcggtgactgaggactggactgtggtgaccatgccgatttgctcagggagaacgttgcaatgcacccagcagctcctggctctgcaggcggcacagcctggggccctgtgatcctctggtttcttccaytggggcggagtcggggrtggagggagctggccacaacccactgctctgatgggtggtttgtccaargatgctgaatgtaatgcctggtcaatgtggaagcccatgaggttgcccagggaagcctccaaaagctgggatgcttgagggtatccaagttgaaaaagacaaaatctgaccatcagccagtgacagtcctggcaaatgaaggtggggcggggcagtgaggggtgggagaaggtgaatgattcattattccaccccgaggtttgctggggtgaggggaagaatcgatgctgctttgggaactgaaggtttttctgttgggaaggccctcttggttttggagagaaagacaagttatgagtagctgctaccctggaacggtgggcagagagcctactaggaaatgtgcagaataaactattttttgaaggaaacactttggccttgactttattatctggattggagaaggcaggttgcctccaggagcaaaggtaggcgttcacctttgcaccctccattcctgacaccacagctgagaccttgagtgagttcccatcacaggggcagacggggatgcagtgaaggaagctgaaggctagactgaaatggacaaagtcatccctttttgaaagcactggggaaaaatgttttagaaaattatatgcaagcctagtctataccacaggcaaaaagggagcttctctggaagaaggggttgggggttggcccaggcacttcacgtgcgagttccattcctttccaccaccttgatccacccctgttgtgcagatgaggaagctgaggcacagagaggtgaaggcatttgtccatggttatgcagagacggaatcaagtctgcttggctccagaacccagccctttccttttatgacctaggtccttggtgggcaggcttaagccacacttaggagttggttttacatggacccaaactgcagaagaaccccctacccgccccccaccgtggcttctcagcacacagtgactattcaattttgtctccaaaacacgtaacaacaactgttaccttgattctgcctgacaccttttccaggcaattccccctcaccagggatgggccaatcagagttctccattccccctgacagtgactgacgcaggtatgggcgtgtatccccagtagagccgatcagaattctttagggatggctgacagtgctgatgtggagagaacctaccaatgcagggggaagccaagcccagagatagagggggagatccagtcctgttggtggtacttggatgcctggatcaagccatgcctgaagtcagtagcccagtcccaggaacctatccatggtttttgtttgtttgttttaatgtttgcactagtttgagttggagctctatccttagccctggagatggcccagttagcccagaagacagcagttaatttccacccacagcagcacctaatggtggtctgtatcagcagaccctccaggcagggaggcgaggacctgagaacaagctgaaatgcagccctctgggatggggaggaggaagctctgatttggttttgcatcctgaagactacaggtcaattgtttgttttcatccggatttgaaacccggacacaagttgctatctgctgctaaggatgctggagtttactctgtggacatcagctgaaagtgctttctctgacaaggctaacttttctcccttgaaggacttagtgtagccagtcacaaggggaagggagaaaggatcagacaactgagtgtggacagaggtcttgttgggcaggttgggtgctaactgaacactccctacgatggccactggtcacgtgccaggttctggcctctttccacacaatcctcatgtgacccttggaggtggctgctacatacactctatcctcattttttttttttatgagacagggtctcgctctgttgcccaggctggagtccagtgatgtgatttcagctcactgcagcctcaacctcccaggcacaaataatcctcccacctcagcctcccgagtagctgggactacaggcatgcaccaccatgcccagctagcttttttggtttttgtagagacagggtctatctatgttgtccaggctggtctcaaactcctggcctcaagcgatcctcccacttcagcatcctggagtgctagaattagaggtgtgagctgctatacccagcttctatcctcatttttatagaagagaaaacccaggctcagagatgagcagacttctccaagtgcacatagcaggtaaaaggaggggccaggctaggaacccaggctggctcagacccaatccccctgggcttaatgcctttccgtaaatcctgaacctttgcaagggttagatcccaaaacatgagagcatcctgtagaccaagctccactcctcctgcctccctgacttcctggctaattcagccaatggcatcattcagatcctcatcaaaagcctcatgctctccatgccaagagcccacactagggtgggctgccctctttcccgattggcagatttttcagcccttgattggcagattctgtagcccctaaaccactcagaggaacctcacatttctgcatgcacagtgggctcctccacatcacaaatgtaaatgtggactgggttatccccatttctactcctttctttggcctccccaattgattattttatttattatcttgttattttgccttcctctgctccaaaagtcagttggccttttttctcagggtcattcttttcccctaacgttttactatgaaaatttccaaatgccaaaaagtcaaaatatttcatagcactcaccccaacccaccatcttgatgccaccattgacatctgactgtgcttgtaccttctttaacaccattctctccatctgtccatctctctgtgaatgcatgttattattttgtcacatttcagagtaaattgcagacattaatacatttctccagagttatttttgcatttcaaaaccagttgtttgttttgtaaatcacttcctgagcttttttgcagctgagagcacatccagatcaacagagctgtgttgagacgaagcagccagccgcgtggccagagagggagctccagttctcacagtgcacacagcaccagaaaaacgctttttttccattattttatgagcatatgccacaggctgagcactgtgagagggtgctgccatgagcaaggcaagccactcctgcccttggggactgatatcctggggttcccaacaggtagaaattgcaagtggctaaccataaggagatgtttagggtcacgactagtcaaaacagtgactgttaaatccagaaatgtccagggtccacttttcagagttcttgtgacaggaacgtgatagagaagagaacaaggaccatccacacaggccacagaaaggttctgaatgaccaccacgcacagcaaagcctccctatggcttctgctaactcaaccagtgtggacaaatcagccctcttctgggcactggccgtgcagccgatgcaccgagccacgctgcttgacgtccagacagatctgccgaaaatgccacttccttgtactaagtgcccttgggacaaaagtatcactcaatcccataagacatggcatgagtcctggggcccaacttcagctatgcgagagcatcttgttactaccgtgaaccaaccagtctaaactgtcagttcacctccaggtgagcactggctgtttctcctggggaacctcttcccccttggcctttgtctggctgactcctactcatccctcaaaacccaactcaaatggcacttcccccaggcagccttctttgaccacctctcccatgggttgggagccctcctctgtgctctgacagcccctgttctctctcttttgtgcaacatatgtgaaacagatttctaactaaaacacacagctagggatccctaggtgtttccggttgctgaaccagggctggattttggagaacagtctgctgacagagaggtggtcctctcctgggaggggaggtgagaggatgctcctgaggatgttctgtattttgtaataccctgaccaacgcggtatgtctctggatggaatactgtgtaggaaacacaggcaaagagcctacatgtttttttgtttttgtttttttgagacagagtcttgctctgtcgcccaggctggagttcagtggtgcaatcttagcacaccacaatctctgccacctgggttcaagcgattctccaccctcagcctcccaagtagctgggattacaggcacatgccaccatgcctggctaacttttgtatctttagtagagacggggttttgccctgttggccaggctggtcttgaacccctgacctcaagtgatccacctacctccacctcccaaagtgctgggattataggtgtgagccaccacacctggtctagtattttgtattttgtatatttttattgtggtaaaatatacataagaaaatcttaaccatttttaagcgtatagttcagtagtgttaagcgcgtccacactgctgtgcagtccatctccagaatgcttttcatcttgcaagagtgaagctctgtaccattaaacactaactccccactcccctcccctcccagcccctggcaaccaccattctactttctgtgtctatgaatttgactactctaggtacctcatgtaagtggaatcatatagtatttgtcctctttgtgactggcttatcccacttagcataatgtccttagggttcatccatgtttagcatgggtcagaatttccttcctttttaaggctgaataatactccattgcgtggctagagcacagtttatgtatccacgcatccatcagtgaattacttggtggcttccaccttttggtggttgtgaatactgctgctatgaaaatgggggtacagagtcaggtgcagtggctcgcacctataatcccagcactttaggaggctgaggcgggtggatcacctgaggtcaggagttcaagaccagcctggctaacaaggtgaaaccccatttctacaaaaaatacaaaaattagccaggtgtggtggtacgcacctgtagtcccagctactcgggaggctggggcaggagaatggcttgaacctgggaggcagaggttgcagtgagctgagatcgtaccactcactccagcctgggcaacagagcgagactacatctcagaaaaaaaaaaaaaagcaaacgggattgctggacctggcggtaattctttttaattctttgcacaatcagcatactgtttttccaacgctgctgtgccattttacattcccaccaacaatgcacaaacttccctaatttctccacatccttgcccatactatttgttttcctctttttgtttttggtttttatgtgtttgtttgataatagccatctaaggggtggagtctagaagcaattgaactcaaaagtcattgcacctttttacttgcatgcctcgatcgtcacggacgggatatatagaccccacctgtgacccggacatccaattcctctgcctcttgcttccctcgctcacccagctggccccgccccgctgcagccacgcctccctctcttctctcccacctgctccccattctgcgatgatgctgaaatccagacgcccgcagacccaggcggtggcagaactcctgggggccggtggagaaggaagcagctggccagccaggctcattctccgtgaggcggcacccaaggtactttgttcatctttccccatctcactcccactgcctgaacctttctgggagcctcctcttccctttagttgccgccagggtcacctgcaggccgcacaagtgtaaggcctttctcagttcaagtcagaggaatgttccgtgtccctagccctcgggtctgccttatctcagttcacaggcccaccctgcgatccgctcctcactctgtcttagaatcttctcacccttcccctcaccagctcccaagcgtagcaggggtgcttgtttaaaaagctcagattgactctggccctgcctcagtctctctctctctctctctctcttttttttttttttttttttgagatggagtttcactctgtcacccaggctggagcacagtggcatgatctcagctcactgcaacctccacctactgggttcaagcgattctcctgcctcagcctcctgagtagctgggattacagatgtgcaccaccacacacagctaatttttgtatttttagtagagacggggtttcatcatgttggccacgctggtctcaaactcctgaccttaagtgatcccgtcaacttggcctcccaaagtgctgggattacaggtgtgagccaccgtgcccggccatgcctcagaatcccaga

SEQ ID NO: 94633 - DNA, 12362 bp, Homo sapiens
aacccacacagacaacccactcctcacccccaggtgttccgcaccaagacggcagccctgaaacagcgttgggaacagctggaacaaaaggagcgggagctaaagggatcgttcatccgctttgacaagtttttgcaggtaggtggagcctcctgggggggaggcggggcctatgggtagcagcccacactcctataggggcccggcaggtaacaaaaataaaagaagtggttttcgtcatgcaaaaggaaacggcgggaaacacacacgcactgcctgaagcaaccgattaaaaaaaaaaaaagcgggcgggggagttgggtgaagagccagcttccgagccaggcctgctggccgcccctggttttgcgagcgaatgtcagggcaggatggaggtgccgaactccccgccagctcctgagtcctgaaggtcgtcttctccccaccgtactccccaggactccgaggcccggcgcaatcgcgcgctgcggagggcggcggaggagaggcaccaggcgggccgtcgggaggtggaggcgctgcgtctgtggacccagctccaggagctacggcgggaacacgcgcggctgcagcgccggcttaagcgcctggagccctgcgcgcgcctgctggagcaagcgctggagctgctgcccggggtgagtccggggcaggaggctgggagctcggcgccaccgcgtggcgctgagtggctcagggacggcttcggaccggcgaactactggttcgctgaactactggagatcttggcatgcatgccgagaactatcacttatggagcgctcactgtaagcaagggatacgctttggtttttgtggttgttagttttggaggttttttgagacagtgtctcgctttgtcaccaggctggagtgcattggcgcgatcacggctcactgcagcctcgacttcctgggctcaagggatcctcctgcctctgcctcccaagtagctgggaccacaggcgcacgccaccacgcctagctatttttttaaattattatttttagtagagacggtggtttctctatgttgcccaggctggtttcgaactcctgggctcaagcgatcctgccacctccgctcccaaagtgctgggattacaggtgtgagccaccgcccacgctttgttcttgaatcctccccaaagtccagtgaagtaagtcctgttattgtcaactgtccaccccattttacagataggagaactgaagattcagaaagctaactctggccgggcgcggtggctcacgcctgtaatcccaacactttggggggccaaggcgggaggattgcttgaagccaggagttcgagaccagtctgggtaacatagagtgacacctgtctctacaaaaaattagtcgggcgtggtggcgtgtgactatagtcccagctactttggagcggagatgggaggatcgcttgagcccaggagttcaagatgacagtgagctatgatcgcgccactgcactccagcccaggtgacagagcgagaccttgtctctaacaaatggaggttgacatttaagtcactttccagaaagattattccaataataaggaacgctggcggccaggtgggatggagagggtaaggcactgcaggcccatgtgagtcccttccccgcccccgactctagttccaagaggttccggagctggtggcgcgcttcgacggcctggccgagacgcaggcggcgctgaggctcagggagcgcgagcagctcgcggagctggaggcggcgcgagcgcggctgcagcagctgcgggacgcctggccggacgaggtgctcgcacagggccagcggcgggcacagctgcaggagcgcctggaggctgccagggagcgtacgctgcagtgggtacgacccgccctaggtggggggcgctccggaccccaggcttccacagccgggcggggaggaacgccagggctgatgaggaccgatggggcaatgcttaccccagagggtccgctgcactaaggaggggaatctcaggcatcaccgagccgtttcgggcatgaggccccgccccatccgcctgcacaaggctcctgcaccccactcccgagagcacctgactgcctgactggcagaggtggatgggaagaatgccgggcgcggtggctcatgcctgtaatcccaacactttgggaggccgaaaggggcggatcacctcaggtcatgagttcgagaccagcctggccaacatggtgaaaccctgtctctactaaaaatacaaaaattagccaggtccactggcgggcgcctgtactcccagctactcgggaggctgaaggaggagaatcgctaggctctgggagccggcggttgcagtgagctgagatcaggccactgcactccagcctgggcgacaaagctagactccatctcaaaaagaaaaaaaaaaaaagtggctgggaagagggggcagcccgccttggcccagttgccataattgggagtggggcgggtgttctccaggaatccaagtggattcagattcagaacacagcagcggagaagactctgctcctgggacgcagcaggatggctgtgctcaacctgttccagctagtgtgccagcatcaggggcagcctcccaccctggacatcgaggacacggagggacagctagagcacgtgaggacccctctttatggcacctccagcccccaaacactccctctttggaaaaatgagcctaaaaccccacagttagtgacaccttctctgggttaagcatggccctctacggtcagagcccttgccccagccgtggctcgattgtcgggcaggcacccggtctaggatggattcctgggtgcatcttggctctgacagtggccagaagaaagccatgcccctctctgcgacaaagctagactctatctcaaaaagaaaaaaaaagtggctggtctcaatgccctccctctaccaggaaggccagggtttgtgctgagtccctcttttctcacaggatccaacagcccacacgtgtcaacacctgtaaaaaatcatgaggtccagactcgctcttcattaatctctggccctctgtctccctgcttcctgcacagagaggcctcagcttccgcagggagggtgagggtggggttaggctgagttgtgtggtgtagaatgtgccataggcttttttttttttttttgagacagagtctagttctgtcacctaggctggagtgcagtgacacgatctcggctcactgcaacctctgcctcctggcgattctcctgcctcagcctctcgagtagttgggattacaggcacacaccacgacacccggctaattttgtatttttagtagagctagggtttcaccaggttggccaggctggtctcgaaatcccaacctcaagttatcctcccgcctcagcctcccaaagtgctaggattacaagtgtgagccaccacacccagcgtgacataggtttacaatggaggaagatttcagacttcaaacacttcttttgtttctagtgggtatacccaaagcatggcccctttgagaactggaggaaaagtaaaggtgtagcaggatgagccacagacaaaactcctcagacaccggattaaagaaggaagaggttttattcggccggagctcggctcttaagacacgagtctgccaatgctcccagccgaataaaaaactcttccttctttaatccggtgtctgaggagttttgtgttaatccggtgtctgaggagttttgtctgcggctcgtcctgctacaaagggaggcatcccaccttttccccaaccgattcccattcctgttctgcccaatggccaggattccaaccgaatgccaagatctgggtcctgggaatccgcttcgcccctcctagttggttggatgcatcgatgccactgttcttccaagcctggcctgttaccttgtggcacatgagactagcagaaacacaggcttgatgtaaacaggcaaaagtcagtgccttttcttttagtccaactggagtagtggaaattaagaagaaacaaaatctgtaaccggttgtaattaattcgttgtaaacaccactgcactaggaccagaccatctcttttcaaaatcaactctctgcccgtcaaggagaaaggctccacggagggacatgatgccttttcccacctcccctaacactccctggcctccgggcctgggactcacactgtcctgcggctgccagaattcagtaacagcttcatttgttcattgcattatttttccagttgccccctagttatgacaaggggtaactatttttttccatttttggtggagataaaaagtttccttctcagctgttgatacggtgatgaatatgagggggagcccacagatggttgtaagttcaccctcaagttctagtttttacaatggatccatggtatttattaagttcatattcataaagaagttaattaaaacaaaaggagagccacccacggagataagagtaggtcacaaaccaatgaatatgactgatccagttacaagaaaataaagctgattgatgtaaatgaaaatactaattggatagtgcaggtgacagcagcgaggaagctgtgaaggtgtctgctcacgcagcagttgggaaggttggcctgaggctttcaaaacccagaacggtttaggatctcagtcaccacctctgggaaccaccatcatcactgttcttttaatgaggggatctccagtccccgccctacctttcggcctcccccgcgtgttgaggggtgggggctggacagtgactctggggctgggatgtgacttcgtgctgggcccccccaggtgaagctgttcatgcaggacctctctgccatgctggccggcctgggtcaggctgagcctgcagcccctgcctcctagccctgacacaggtgagcagcgggagagggaacccctgagagaccctgagataggagggcccacatttccaatggggtgtggactgagtggctcttcctgaatccgtttcctcattgggaagatgggagggctgtgcctgttcagagtgctgtgggcctgccatgaggggcacatagcaagcactccataaatgcaggccctgatgaggaggtgatgggaaggtcaaggggctatgtgtggggcaactgcctctaaaatgagatcagaccaggccctccctgccagggtggttggggcatgaaaaaaaactctttgtcaggtctcagaacagggtccatgctagatgagagatcaccaaggccccctccactatggactctgccaggtgaggggcccagcctgagaatccagctgctggggctgcccttgaccttctcagaacctcaaacagggggtgggtggcaagaagacagaggacaggccaggttctgacctccaggtgtggaggggccgcgttaacctcttcatagccagaggggagcagctgtgtccttgccccctgggctgggcatcctgttcccctcccccagcccactcccagctgcaaccatgtccagtgggaggaagggggaccaactcccgcctctggcacctggtttgtgctctgagcttcactttcctcatcgctaaatggacaaggcagcagaactcaccctcaggagacccgcaactcctctgccacgttagctgggattttagtacctgggtctctccattccagttccccaagtagaccgcactcctggccaccagcagtgctcaataaagatttattacattaaaaattccattgccaaaccctgaggcactcagggctctgaccggtgcagccatgacctctgaacccagaacacatggaagcagcagcagctgagttgccaactcaagtcttggcctgcctggctttgctggcgaactcctgcacacccttcaaggccctgttcaaatgtctctgtcttaggctgacgcagctgctgcccttctgtggccatacagtgctccttttcacagatgatggctcctgcagggagtgcccccagtgcccagcacagggccaggcacacagtggtgcacgggaacgtctgctgatgcccaccctaaggccaatcaaggagccacggggctgggtcctggtcctcacatcctcttccgcatcttgcccttcttggagcgggcaccccggccgaaggcrccctgctgcagctcctggacgcggcggcggttgcgggcagagagctgcttgaggccaccacgctgcaggaagtgcagcttctgggcccggcgccgctgcttcaggatctgctgcttggtcttgagttccrggcggactcggcctgcaggggtgcctggggcgtggggccgggatgcacctgctgggacagggattcagggagctcagctgttgggatcactcccaagatcccctcctcccagaagcttgcagactcctcccctgcccctactcctgttctgtgcttattgctgtggcccagtgtctgtacacagtaggtggctaataaagttttaggcagcctcatggagtggtcaataacacggggccagaaccgctggggttcaaatcccagctgtgacctcttggaccgtgggcaagaagttaacggctctgtgcctcagtttccccatctatgaattataaatcacagcacctccctcatgggtgaagagtaaatgcatttccatggtgtaaagtggtcagaatttcaaggcctgtcccatagtgggagccttttgggcatgactgttactattaaaaattctccaaccaaggagtgtatgtctccacagcacacctacggcacgccaggctctgaggccccccatagtaaccgatacagacctcagcctctgtctccatggacaccatgctctaggcttgttagatgaaaaaagagtgtagatgaaccttcctttaggtgggagaggaatcaaagaaggccagagagggagagggacttatctgagatcacacagcaaagcagcagcagcagcagaggtcagcgaccctgccccagccccacaggtgggcatcaggtagtccattcttctagttctccgggaggcaagcaccaccctccctggctcccactaagccctgtgtcctcctcctcctcttccccattcataacagcagcctccccagggctcctagagggatgaccattaaggtggtcccagctgtctccaatggagccagggtgcctcgcaggacctatcacctccaatgaggacagcaaaggaagaacagctgctttttcccaaagcccacaggtcgcccccgtctccccagcccctgcacgcccactgcacggcaatgctcgcagcagaagctgctgtttcacctaggtaaaaacaggctgagaagtgaggtgtgggtggtccccacccagccatgctgacaaggagacactcccacagatgggagagctggagagggaggagccacagagaacaggcccaggcaaatgcacgcaggctcacagagacacccaggggaggcagtgaccagccccaggaggtggagggacacaagcaggggctaaggccatctgagagagacccaagacatggtcccaaactcccctctccccagggaagactccaggtgggagccttgggcagctgggtgacccaggttcagtcatagccctcataaggcacctgtttcctggcctgtaaaatgggtattcgcagtcaccttgcctcccaggtcatgtgtggccttccaggacagagcctgcctgcacccagcaagcgggagcccctccctgataacagcccttaagcacaggctctggcagacagagccggcttcaaatccaccttagcttgttactggctgagggacccaggccagatcaaagaggtccaagtcctcagatgaccaaatgtaccacttgccaacccacatttcaaggaagtatcttcctcaacatcccctgtgatcgcctcctcccagaaccaaagctgcttctgactgcgtctttggtgacatgaacttccccacagcattgctaaaaagaacgtcactcctaaggatgccacagggaatcaattcatgctcactgtcaggtcgaaccacatgcaaatgccatttttgcaggtgaaaatggcctgcatttgcacaaggttccacctcccgggttctctaggattttacacaatcggcttaattaggtgaacagggcatctaccagaagttatccctgtagcttcatctgtgaagtggaagggggtcggggacaaggcacctgaggggcatggcacttcccagcgcctgtcaggcggtgctcgtgaccatcagaggccgggacagtaggaagggggaaactgtgggtgtgggggttgggtgggggggatcatggagggacccagggttttggcagcataccccaacacacccagctctggggctctgcagtagcccctgcacctgtgcctcagcgttaccctaatctgaccacaactgctctgcctacctgtgcacccacactccccaccctggctctcaccttggccacggtctcgcttcccacctcttcgctctgggcctcgccggtcagatgccccttcttcgtccgagtcacgatcatcaattttctgtttctgtttccacttctgatagctgggaaacctcgttaaggaagctgcgtgaagcccctgggatgggagaaggctcctccccacactgccccagcagacagagttccgttatcccagccgcagctgaagctgctcggccccgcccccagcacacaggtcccacttattggagatgctgttgctgaagctgctcggccccgcccccagcaccaggtcccacttattggagatgccgctgctgaagctgctgggcccgcccccagcacaggccccacttactggagatgctgctgctgaagctgctgggccccgcccccagcacaggtcccactagttcgagatgctgctgctgaagctgctcggccccgcccccagcaccaggtcccatctattggagatgcggctgcttaagccgctcagccccgccccctcctccccgcccccgcccccgcccccaggttccacttaattgaagctgctcctgctgaagctcctcggccccgcccctccccagccacgcccctcaggatacaggtctcgcttgtaggagctgctgatgtagcggccgctctctgtcttaatcttcttcttgtcttcctgtcctgactgtcccacaaaccgcttcttcttacggtccctgcaggagagggagttgggacggctgccgtggagggaaacccttggagtgccggctgccgcttggggcctgtctcctcacccgaccctcttgtcaggttgttggagcattaaaggaaagcagtgcagccatgtctggcatgcagttggcgctcaataaaggcttcttccctatccctcctcacctctccctgcagtccaggtctcaaaagggagtgcggaggtcagaggactgccgccagcactggggcctggctcagggacaagggcctcctggagggtttccaatcccctccccctacccagctgtgaccctgggttgagtcacatacactctccagacgctagagtcctgaacgaatgggtcctgagccctgtctagaaagacttgccagcaaaaagaatagacggggtcaagatctctgtggtgtgtgatcaaatcaaggggacagcacagccaggggccatcacacctgctgtgagtggtcacatgggggacagccaggccataatctgggctgtgcaggatcagatgggagtgaggacttcagggagctcaccctgcctgctggcatggagggcagctcactcgatcactcaccctgggcctggaggggtggctcactcgctcactcaccccagggaatggaggggcggctcactcgctcactcacttcagggaatggaggtaggggaggctcactcgctcactcaccccaggcatggaggggcagctcactctctcactcaccctgggcctggaggggcagctcactcgatcactcaccccgggcatggaggggcggctcactcactcactcaccccgggcatggagggaggggcggctcactcgatcactcaccccaggcacggaggagcagctcactcggtcactcaccccgagcatggaggggcggctcactcgatcactcaccacttgagctgctgccggcccctcgtcaggttctgggcttcatcccccatcaagtccaggacagcgccagctgcctgctgctcaaaggctcccccttccccgctgatgctcaggctgcagagggagagtgggagacataattggattgatgggacccagcggacccaactgccccacccaggacccagccagccactcacccccgctcgctgtcaaagtccttgggccggtaggggatgtagaattcctggtcccgctgccgggcctcctccctccgcctcttggctcccctgttgggtcctgaccgctgccgcttccggcccacgacctctgagaaaatgtcctggcagagcacagaccaaggcccagtgtcatgcctgctgccccctggggacttccccctgcctccctacccaccagcctggccacagtgaggggccagtggcttctcggggactttcaaagcttcattttgccatttcttagctgggtgacagtgtctcctgtgggaccctcagtttcctcatctgcacacacagtgcaacccctgcctcagggaccagcagaggcaggacagctgggtgaggaggagagtgccggccgagggagacccaactccccattccagctccgcaccccaggctatgtgacagccggccctgcccctctctgcgcctggcctgctctgaacaacatggactaggccaggggtctccaactggtcttcttggctactgaaccctctgtccaaacaaaacatgagagagggacatcctgggggacgcacaggcccaggacccacccaccaggtgaatgggacacttcatggtcctccctctgagtggagacctacacgtctcactgcagaagccctgatgtgtttggtggctggtgatgccccggaccccactgagggtgtcatgtcgtgcacagctcctcaggctaaagatctggccccagagttttaaacgagggatggtggacaagaaccatgccccgactctgcagatgggaagctgactgcatccacctccatccactgctcaaagatcctaggacagcctcatgggctgctgggacttagccaccccttccccataccccaggtccagggtccccagggtggaacctgtacctccacactctctcccgcctcctcctcctcctccttctcaggctgcttctcctgcagtgctgggcggctcggggctgggcccactgggccctcctgctgctcctgccgcccctgctgtccctgctggaagcgggcgatggccttgcggtccttctgccgcttggcgcgcatcacctggctgcacaggtctcggctggaggcgttgatctcaaagatagtctgtggaggggacacccagtcctttgcccactggcctcctactcctaaccccacccttaccacttggtgggcttcctatgggcgttcttccccaagtcttccccagtgtccattatctgcacttcacaattagatagacagacccagaccaggcgcagtggctcatgcctgtaatcccagcacttgaggaggctgaggcgggtggatcacttgaggtcaggagttcgagactagcctggccaacacggcgaaaccccatctctgctaaaaatacaaaaattagctaggtgtggtggtgggcacctgtagtcccagctacttaggaggctgaggcaggagaatcacttgaacccagaaggcagaggttgcagtgagccgagattgcaccactgcaccccagcctgggtaacagagcgagactccatctcaaaaacaaaaccaaacaaaaacacagagagacccaggccaggcaccgtggctcacgcctgtaatctcagcactttgggaggctgaggcaagaggatcacctgagcccaggggtctgagagcagcctaggcaacatgacctcatctctacaaaaaataaaaaaaaatagctgggtgtggtggcatgcacctgtagtcccagctactcaggaggctgagataggaggatcgtttgagcccaggaggtcaaggctgcagtgagccatgattgcaccactgcactccagcctgggtgacaaagcaagaccctgtttcaaaaacaaacaaacaaaaacccagagagggtgagtaaccagcccatggtcacatgctaggaaaaggcatagcttgtcaacccaagtc

SEQ ID NO: 94634 - DNA, 40140 bp, Homo sapiens
ccctggggcggggcgagtggctacccctgggggtaggtggtggcgtccacaagagagcacggagctttgcggcatcccccttcgccatccgcggggccccgaagctggcgccttcagatcgggagccaaacagcgactcatcacagtaagacggggtgtggctgatgggtctggcaaatggaagataaacgccatgagctgggggatgaacaacccctcaaaactttaacagctctcccacccaccctgggatggcagcagcagaggagggttgcctgcagatcccaggagtccttgtctcccagtctgaaacctacagcgaggccacagcctcttaagcaccactgcccccggtctctgctgattttccctgcgaaacatccactgcccctgcatcctgaccccattcccagacatgtgccccaggcctggacaatttgcatattccatcctcctggccacatggattggttcacgaatggccagatgacccaagcctgtccaatcagaatctgccttaggaccttgcagaaaccactaggaaagagatgtctttctgccacctgactttacttcttgctaagctgataggatgtcagcccaaagcagcttgtggctatctccttcctactgaagattgaagggcatgcagggaaaagcagcactaaggtggagacagacagttccagccacagtttgagcccctgttacaggagccccacatgccttctcctggggaagccagtttgaataagttttctgtcacttgcaattgagagtcacaattagtataaccttagtctttatagcctccactttttcttttctttgtgagacacgatctcactctgttgttcaagtggagtgtagtggcacagtcacagatcacagcagcctcaaattcctgggcccaagcaatcctctcacctcagcctccctaatagctgggactacaggcacagtgccaccaagcccagctaatttttttgtttttgatttttagtagagatcagatttatgttgctcaggctggtcttgagttcctgaactcaagcagccccctgccttaacctctcaaagtgttaggattgcaggagtaagccaccgtgcccattttcttttctttctttctttttctttttttttctgagacagagtctcgctctgtcacccaggctggagtgcagtggtgcaatctcagctcactgcaacctccgcctcctgggttcaagcgattctcctgcctcagcctcctgagtaggcgggattacaggcatgtgctaccatgcccagctaatttttgtatttttagtagagacggggggggtttcaccatgttggccaggctggtcttcaattcctgacctcatgatctacccacctcggcctcccaaagtgctgggattacaggcaagagtcactgcgcccggccttttttttttttttttttaagagacagggtctcactctgtcacccaggctggagtgcagtgacgctcgctgcagctgcgaactcctgagctcaagtaatcctcccacttcagcctccagagtagctgggactacaggtatgcaccactatgccctgctaatatttttattttttgtagagacagggatctcactatgttgcccaggctggtctcaaactctggagctcaagcgatcctcccacctcagcctcccaaagtgctgggactacaggcctgagtcagcctgtctggcctttttttttttttttttttttattcaacagatattcacggcatacctgcaagattccacgcccatagtttttttggccaggactgaaagtgcttctatccccaaactgcaagtctttgaaagggcaagcttttgccacttggtttagctgctcaaaccacattggctaatgcctgtatatgtctggtgccaaggtttttgctcaataacttctctacctcttatgcaacccctcacttgacaccctctacctgttggcatccagaagaaaattccaccctccaggtgagcaaggagttgtcacctcccttttcatggacaccatacttcctaatgcagcctatctttacctcagtgttttcagccatgttgtaggtatcagtgttgctaatctccacctgaccctgccttgtctacagaactggcaataactgattcttgtttttataataggtatcattcccattctcatttcatttctctcatctgaaatatgtccctgtggttcagaatgaaccctaactttagctggccagttcttatggactgaattgtgcccacccaaattcatatgttgaagccctaaccccaaatgtctctacacttggccttaattatttagattaattaaaggtaattaaggctggccagacatggtggctcacatctgtaattccagcactttggaaagcagaggcgggagaacgacttgagctcaggagtttgagaccagcctggccaacacagtgaaaccccgtctctactaaaaatacaaaaattagccaggcatggtggcgtgcacctgtaatgccagctactcgggaggctgaggcaggagaattccttgaacccggaggtggaggctgcagtgatccgagatggtgccactgcactccagcctgggcgacagagccagactccatctcaaaaaaaaaaaaaaaaaaaaaaaaaaaaaaaaaaaaaaaaaggtaactaaggctaaataacattataagggtaggggatcctaatccaatagaactggtgtccttatgagaggaagagacatcaggggtgtgtgtgtatacagaaaaggcccttgcatgtaattgaaggattaaaaaaaaatgagaaaaggccctatgatgacactgtgagaacgtggccaactgcaagccaaggagagaggcctcaggagaaaccaaacctgccaacaccttgatcttgggcttccagcctccagactgtgacaaaataaatttgtgttgtggccaggcgcggtggctcatgcctgtaatcccagcacttcgggaggccaaggcaggtggatcacctggtcgggagttcaagatcagcctgaccaacatggagaaaccccgtctctactaaaaatacaaaattagccaggcatggtggcgtaatcccagctaccagggagggtgaggcaggagaatcgcttgaacctgggaggcagaggttcaggttagctgagatggctccactgcactccagcctgggcaacaagagcaaaactccgtctcaaaaaaaaaaaaaaaaaattaagtcaggcatggtggcatgtgcctgtagtcccagctactcaggagactgaggcaggagagtcgcttgaacccgggaggtggaggttgtggtgagccaagatcgtgccactgcactccagcctgggcaacagagcgagactccatctcaaaaaaaaaaaaaattgtgttgtttaagccacccagtctgtggtattttgtcatggtggccctagccaactactgtgctaatcttctgtgtctttgtccaaaccactgataacaataaacaggacagagccctgtggctcaccactagacacctccctccaggctgatattaatctgaaacagtccaaataatctaattctaatctaattaattaacaacaataacaatttgcattagttcctatttttctaacttgttcataaaaatgcagcaagaaccattttcaatttttttttttttttttttttggagacagggtctcactctgtcactcaggctggagtgcagaggcgtgatctcagctcattgcaatctctgcctcctgggctcaagtgatcctcccacctcagcctcccgggagctgggagtacaggcgcacaccaccacacttggctaatttttgcattttttatagagacacagtttcaccacgctgcccaggctggtctcaaactcctgagctcaagtgatcccacctcaacctccaaacgttctgggattacaggcatgagctaccccatgtggccaaaacccattttcaaaatgacttcagaaacaccacatctatgtcatttcaaggatcgaacacattaatattaataagcttatgcaaatttctctgtgatcttatgcctcagctgactcctctgggcctcagatgcccagtttgtgacatttggggatagggagttcaccatcacaaccatcaacactaccatttattgacagctttctaagtattaggttactgtgcgaagcactgcagacccctctctcatttaatccatcaacaatccccctaggtaggaataattggtcctattttccacatgagtaaactggctcagagaggtcaagatgcttgcccaaggtcacagagcaggtgaacaccagagctgtaactggaatccaggtggctgcactgagtacaggatttgcatctccctaccccattacctgtatttgttcttcttccttggtgtgagggtgggggtgctgccccttgagggggtggtctcacagctcccctttgcccccaaggccttcgatgcctccttgcccacgcctctggttctgttagccttctccacccagggcggatcgaagtccggtggggtaggccgggtgcctgctgggctgccaaacagagtctcatccacatatgacgtcctggccttgacccggtagccacctcggcagcggtgctgaaggccgagggtctgcatcccactgacggccagctccacgggggtcttcatgctgcctgtggtccctggtgacagcaggtgtgctctgccggccaggccctgcttccgaggctccctgtgagaggaggtcagagtagcacccctgagccacagaagtgctaatggaggaagaccggtagtgtctgaagttctcatcccaagggtttagttctctctcaaccagtctctcaaaggggagctgtcaacttcagggggcattttggaaatttctttggcttttttttagttgtcataatggtggtgaaaggggggctactggcaattatttacagaatgactctggcggtgaaggagagatgacacctgtgtctatttaggcaccaaccagaaaacacactatggtggtaggggagacaggcactttcctatgtgtactgatgggggtgggggcaatgacagccagcgtggatcccatgcctacctcctgcaaagagctttacaagcattgtttcatttaatcctctcaacagcactgtgaagtagcttcgaatttgtccattttacggatcacaaaactgaggtgaagtcacatgtgtaggtcacacctataaagctaaaacggtggaagtgaaatctgagtccagagcttgtgtacttggctacactgctatcgggagatcaccgccgcccccaccgccccacattctgcgactcccaaatcaatgacccgattaaaaagtgcccgaggtccctgcatttttgggttgttctcctacctgagcatcttggctcgtaggcatcgggatcctcagggacccgtccccgcaccttcttcccaccaggtctggacccgtcggtgagggcgcgggggcgcgcggtgcatccgggatccccgtcaatctgcagcccggaatgcctggggccccggacccccggcagcctaggccgtcccggggcaccgcgcgcggacggactcacccgaggagccggcacaggctacgtgtgaacggcccgcgaatccagaaacccagaacccagcactttgcacccagcaaccagggagcagccagcagcactgcggacgcggcccggaccattcgcgcccgcggatggggggagtccgcccaggggcgggcgccacgctcctgaggcccaggaggtccctaaacatggagagggtcctctggtgccactcactcaggtgcgtgtgtactaggccgccgagggccgcaggcactggcgaaagctcagcggaggtcacgtggtcaccgcacctacccccccccccacgcagttggtgcgctcctcaggccacgcccccttctgcgttcccagmgcgcggcccgaatggcggycgacaagsgcccggcggctggacctcggtcgcgagctgccatggcccagtggaggaagaagaaagggctccggaagcgccgaggcgcggcctcccaggcccgcggcagcgactcggaggacggcgagtttgagatccaggcggaagatgacgcccgggcccggaaggtaggcgcgtggggctgggacgcatgttcgggcccgagacccggctccgggcagcgcctcgaggcctcagtttccccagctggggattgggctccgcagagtgtggggagggaggctgccgacccgaggaccggtcttgggaccgccggcctgagcacgtgtctcggggcttgtcaggctcagggttccgcggccagagccttgggatcccggggctggagcctgcgggccttcctgccgggttttggtcgcgcgtctctcattggctgcctcctgctcgtggggcggatcctggctccctttcgcccaatgaaaagtgcgggtgcagaagatctgactttgagagtttggagcgttcttgggaggttgaattaaggggaggccagactgcgtggcttgagacagtgtgacgcctccaaacctctgggaaacgaattaaaacaattttttttgagacagagtcttgctctgttgctcatgccggagtgcagttgtgtagccacgccttgctacagcctccgcctcctgggctcaagcgatcctcccacgtcagcctctccggtagctgagaccacagacatgcgccaccacgcccggataatttttaaattttttgtagagacgggggtctccctatgttgcccaggatggtctcgaacttctggcctcaagcagtcctcccacttctgcttcccaaagtgttgggattaacaggcgtgagcccggccagtttgtgtttgttgaccgtttactatgtgccaggctccatgctaagagctgtacgagccttattatttaatcctcacaccaacgttgtgctaacaccaccagcaactgtcatcttcatttttctacaggaggaaactgaggcctagagggttaagaaatagtcaaaggcctggtgtagtggctacacgcctgtaaacccagcacttagggaggctgaggtgggaggattgcttgaggtcaggagttcaagatcagcctgggcaacataggcagaccccgtctctacaaaaaattaaaaaattaggatggccgcggtggctcacgcctgtaatcccagcactttaggaggctgaggcaggcggatcacctgaggtcgggagttcaagaccagcctggccaacatggtgaaaccctgtctctactaaaaatacaaaaatagccaggtgtggtggcatgtgcctgtaatcccagctactcgggaggctgaggcaggagaatcgcttgaaactgggagtcagaggttgcagtgagccgatattgcaccactgcactccagcctgggtgacagagcaagactctgtctcaaaaaataaaaattagcctggcttggtggcgcccacctgtggtcccacctcctggagaggcaatgtgggaggatcacttaaacctgggcggcggagagtacagtgagctgtggctacacaactgcactccatcataagcaacagagcaagactctgtctccaaaaaaagaaaaaaaaaaaaaagggagatcccatctttacaaaaaaagagagaaagcagcttgaccaagacctcacagcttgtgagtacaagagccaggagattcaaacttgagactgtctgattccaaggcctgtgccgtttccattactgaatgtcatgtgtatgcacatgaagggatgggtgtgagcaccaatggggcagaagggctgcgcccattatttcccacagtcctgttcccagcgggtgcctggcaccaggtaggctcagggcaagatgagtaagtggacatttatatgaagagaaaggatcacactccaaggcaggaactagaagagacctcatcccactgtccctctctcatcttccagcctagccagtacctggcacacagtaggtgctcaacaaatgtagagaaactactaaaggtaatgaacagcacaggcgggcagaggtggttattaccaaagaagaggagtctaagtgtagttcagaccaagggcttctcacggcactgccctgtgttcaaatttggcccaaccttgcactggctgtgggacattggagaggttgcttaacctctctgtgcccgtttccacatccgtagaaggcaagtaaatgattatatatgtttcaaaggttgttggcccggtgccgtggctcatgcccgtaatcccagcactttgggagtccgaggagtgaggatcacttgatgccaggagttcgagaccagcctgggcaacatgcatggcgagactgcatctacaaaaaatacaaaaattagccaggcatggtggtgtgtgcctgtagtcccagctacttgggaggctgaggtgggaggatcacctgagctaggtgagccgtgattgccccactgcactccagcctgggagactgagtgaaactctgtctcaaaaaaaaaaaaaaagtgttgaaaagaccaaaggaggctgggcgtggtggctcatgcctgtaatccgagcactttgggaggccaaggtgagcggatcacttgaggtcgggagtttgagaccggcctggccaacatggtgaaaccccatctctactgaaaatacaaaaattagccgggctggtggcatgtgcctgtagtcccagctagttgggaggctgaggcaggagaattgcttggacccaggaggtggaggctgcagtgagccaagatcctgccactgcactccagcctgggtgactgaacgagactgtctcaaaaaaaaaaaaagaagaagactgaaggacatgctgttcatacattcagtagctattgcaggcgcctgtgtgtcccaggcaccttgttttcatgtacctagagcaggggttggcagacctatcaagggccagatggtaaatcttttttttaggttttgttgggccatataagatcactgtcttttttgttggatttctttttcttttctacaaccctttaaaaagtaaaaaccgttctaaactcacagactgttcaagacaggccatggctctgccctagaggattgtagttaatcttagagggtcacagtgaaaagaacacagtctctgaagccagggttcacatccctcacccactacctgctggctgtgtgaccttgggcacgtcactgtatctctgtgcctcagttttcttctctgtaaaatggacagaacaatagtacccacttcatcagattgttgtgaggattaagtgggttaatttgtataattctcagagcagcacctagcttatagtagataccttgtaagtttcagccactcttatgaattgctgctccgtaaatgcttttttttttttcttttttggtaaagatggggttttaccatgttgcccaggctagtctgggaactcctgggctcaaatgatccacccacctcagcctcccagtgctgggattacaggcgtgagccaccacgcctggccatgaatgctatttttaagagaaaggggacagccctgtagtccaagaaggttccccagaggaggtgtctggattggatttagctgtgccaggacaagtgggtcctgggtgagcagaaaggaggccaggcatgagacagaccagagatcagaaaggagattggttggcggctgatggggcgggggtagggggcgggagatcttggaaaagtctagtacttcacatatagtaggcatttcgattggctctttaatgtatttaggggctgggtgtggtggttcatgcctgtaatcccaacactttgggaggccaagaagggaggartacttgaggccaggaattcaagactagcctgggcaatgcagtaagacctcatctctacaaaaaaaaawaaataaatacaaaataaaaaaattagccagatgtggtagtatacgcctgtagtcccagctactcagaagtctaaggtgggagactcacttgagcctaggagttcaaggctgcagtgagccatgcctgcactgctgtactccagcctgggtgacagagtaagaccctgtctcttaaaaaaaaaaaaaaaatgtacttacttttgggattgagattcaaaccgagacagtctatctgcagaccccactctaaacttctgtcctggcccagccaaaggagaacttactagcaaaaaagtgacgtgatctggcggaagcatcattggcttgaatgggggagagagggcaacagcacaggccccttccctgccccctgtggtcccactgtgcctggagtgacaccacctctctgtycttccctcccagctgggacctggaagacccctgcccaccttccccacctcggaatgcacctcggatgtggagccggacacccgggagatggtgcgtgcccagaacaagaagaagaagaagtctggaggcttccagtccatgggtgggtgcaacttggcatcagggactctgcgggagtggcagctggaggtcaaccccgcctctgcactccatcactgatgtccactctgggcccagcactgtggttgggtagaccggggtagcagatgtggtcctccagtcattcagggccttctagtggggcagcgggcctgacacaggagagggcagttagaacaggcctcaggaaaggcaatgcagatgcaggaacaggcaaagacagtcggggacttattgcctgcagagggacatttcagaaggagggaaaggatggaatgggtgggtggtgtggggacacctggctggccagaaataaagcctgactctgttactctttacaaatcagtagcagctggagcaaggatttaaatatcaagatgagtgctgggtgcgatgactcatgcctgtaatcttagcgtttggggaggcagaggtaggatcacttgaggccaggagttcaagtccagcttgggcaacaaagtgagctcccatccatgccctcaccaccaagagggacaagagtccctccccacacccgggtgattctgaagttcattccagacatcctcattgtgtccacacacacttccaagaggcgcaggaccttaccacgcctaaaacgaaggcacagcttcttagtgtcacctaagaccccgttagtgttcagagatccctgctgtctyatgacatcaagagtgggttcacatcagaaaatcagataaggttcaggtgccccagtcagatctgtctcctaagtctcatttcacctttcagtttgtgctttattgcttttttttttcccttgctgtttattgttgatgaagctgtcatttgtcctgtaaagttctctggggttggtgctgtggggactccctcggccccctgacygtttcatgtctctcccaggcctgagctacccggtgttcaaaggcatcatgaagaaggggtacaaggtgccaacacccatccagaggaaggtgaggggtggggcggtcgacgggtgagggcgagggaggagtgacatggccctcctctctggccccttgacagccacyccttgtcccacctgtcacatctcctgccccctttactctgctgaagccccagctagcgtgcccacttcctaggtggagaaggttgggccgagccgagcagagactctgggcctttctgccagttgagcctcctggaggctgcccacagctgaacctcagctcaggcagctcccagccacctatattatcacccagggcttgtgattattcttcttagacatttcgcccagtgggagccatttctctggggttctgaggaggaggastagacgggaggtagagtctggctcctccgaagaagggtgttccagcaatggaaagagttggggtagtgagccgctcatccttggaggcatgctaacaggcttttgaaagaatgggcaagaataggctcagggctgggtgacgggtgcctgcccattcactgagatctatagcatgcccactcctcagggccttgaagctctggatcacatggtgtttggggaggagctgaccttgacttccctgcttgtgcctctccagaccatcccggtgatcttggatggcaaggacgtggtggccatggcccggacgggcagtggcaagacagcctgcttcctcctcccaatgttcgagcggctcaagacccacagtgcccagaccggggcccgcgccctcatcctctcgccgacccgagagctggccctgcagaccctgaagttcactaaggaggtgtgtctgagcttggctagaggctggaggcaagggctgacttgggaccggacacagaggccacgagtgtgctgtcatctcacccctgccctctctcaatcactttctcttctcagctaggcaagttcactggcctcaagactgccctgatcctgggtggagacaggtaaggtccctgcaccccatgccagggtcaccaccatgcaggcacatctctgtgtctccaggacattagttcgatttaagctgtgttgcttattaataatagcagcttctgtgctcattcaaaaaacccaacaaggccgggcccagtggctcatgcctgtaatcccagcactctgggaggccgaggtgggcagatcccctgaggtcaggagtttgagaccagcctgaccaacatagcagaaccctgtctctactaaaaatacaaaaattagctgggcatggtgtcgcatacctgtaatcccagctacaatggaggctgagaaaagagaatcacttgaacccaggaggtggaggttgcagtgagccgagatggcattactgcactccaacatgggcgacagcgcgagactccaatctcaaaaaaaaaaaaaagaaaaaacaaaacaaaaacccaagaaggctggtccagtggtagcaggttatcagaacttaccaacattagtatcattaaagttggtatacaacccccctcactgctaaatttgactggcttaagaaaaaaaccaacaagggaaatcatgtgataaaacattaaaataaattgcccacagaggcactgccactcagaagttctgatgctcctgaaatagagtcatcagctcacaggacagacaggtgtatctattttaaaatgcataatcgtgggcttgtttttgtttttgttttttgtttgtttattttgagacagggtctcgctctgtcaccctggctggagtacagtggcgcaatcacagctaacagcagcctcaacctcctgggctcaagtgatcctcccacgtcagcctccccagtagctggcactacaggtgtgcaccaccatgcccagccaattttttgtattttttgtagagatgaggtctcgccatgttactcaggctggtctcaaactcctgggctcaagtgatctgctactttggcctcccaaagtgttgggattacaggcgtaagccaccacgcctggctgtgggctgttagaaagcagaaagcacaggaatcgagggatgtttgtaatagctcagattcataagatgtagtatctcctgctgttcatctaccacccttcctaggtagtaggtgccacgtctgttttacagatgggcaaagtgaggaagtgacaggttagagtttggcaatgattccatagtagagctgggatcagaatccagtctcctgcctcattccatgccttatctcacagtttatcccttaaagggcagcccctttaagggagaaagtttaaggatgccgctattaacactcttgattctcggagagtttgcttttcagtgcctttgtctccattgtcatttattctttctgaagtttgtgattgtcagaaaggcctccctgggctagtcctggcccaggactaccctggctcctacaggtatcccaagggtgctgcagaggagggctaaaattagggatttgtgcccaaagggtttaaggacgggagctgatagagatccatggaacctgggttctagttggggctggtagttctggggttagttgctgggggcactgtgggtggaaggcagctttgttgctatctggaacaacagaaggagtgaattgaggtctgtagttgagcccatctcttcagaggaactctgttgttaccattcttttgcatatttcagcttgtatctcttgtcagggcaatgcctttgcctcatacctcagcactggcctttcctcagttccaagccttgggtctgtgttcctggggatggggtgtgcagccttgcctggacatttggttatgggaagggaaaccaaagagacctgttctatcaagctaaccccttctctcctctctaggatggaagaccagtttgcagccctgcacgaaaatcccgacatgtgagtttgtggattggggatgactccctgagrtcccttcctagtggtgggggtgtaagagaactgtggtggtggccctggccctggggtcacctggcctgtgcaccctcttccagaattattgccacgcccggacggttggtgcatgtggctgtggaaatgagcctgaagctgcagagtgtggaatacgtggtgttcgatgaagctgaccggtaaggctgcaggtccagccctgagcacttgwgtctgaactgggaaagcagaggcagagaggtcaaccagaggaaggctctgccaggagagccctgtgtggctgagatcgaagcagtgtcttcccagatgtgggctgcagacctcctcataagcggtgctggagctcatctctggggctctctgaccaatatttataattttgcatttcaggagtattgaaatgaataataggacatctaacatgggatttatttatttatttatttatttatgagatagagtcttgctctgtcacccaggctggagtgcaatggtatgatcttggctcatttcaacctccgccttccgggttctagtgattctcctgccttagcctcctgtgtagctggggttacaagtacgcgctaccacgcctggctaattttgtatttttagtagagatgggatttcaccatattggccaggctggtcttaaactcctgacctcaggtgatccacccgcctcggcctcccaaagtgctgggattacaggcgggagccacagcacccggcccctaacatgggatttcaaagagatttttttaaaagcacaaagttgagagcatggactcaggagccagacaggagtgggatcaagtcctagctctgcgacttcagctctgtgaatttgggcaatcactggacatctctgggccttggctgcttcaactgcaaaatggggataaagtagcacgtacctcacaggggtgttgtgaggaccagaagacttgatacttgtaaagtacttggaaccctccctggcagagttggggagggggttgtgggggaagtggggagggggatgtgggggaagtggggagggactgctatcattgattgattgatggtgacagggtcttgctctgtcacccagtttggagttcagtggcatgatgtcggctcactgcaagctccgcctcctgggttcacgccattctcttgcctcagcctctcgagtagctgggactacaggcgcccgcaaccacgcccggctaatttttttgtatttttaatagagacggggtttcactgtgttagccaggatggtctcgatctcctgacctcatgatccgcccgccttggcctcccaaagtgcttgggattacaggcctgagcactgcgcccggccccagctaattttttatttttgtagagatgggatctcgcctagggtgttcttgactcctcctgccttggcctctcaaagtgctgggattacaggtgtgagcctctgcagccagcctgggctgctgtcatttatttcagcatgagtttgtaagaacatgaccaagacagattccagatttcaaggttattgttgtttaggatgaagtcacgtgataagtgtgagtgggctgagttagagtgaggcaagccctgggacactgcagaagttgtggggacaaggatggctgcggttggaactccagggagtgaaggccccctctgacccagtcctgccctctacccttccaggctttttgaaatgggtttcgcagagcagctgcaggagatcatcgcccgcctccccgggggccaccagacggtgctgttctccgccacgctgcccaaactgctggtggaatttgcccgggctggtgcgtgagctgggggtggagatgggggctgggggtcaggctggggcctgggggccagtccctctgcgactcccccactttcccccatgtctcctgcaggcctcacggagcccgtgctcatccggcttgacgtggataccaagctcaacgagcagctgaaggtgaggctgcacctgtcccatcccaggaggttgtgtccaggtgggccctgcaggccctgggccaggaccccgtaagccaacacgtgatgccctctccccacagacytccttcttcctcgtgcgggaggacaccaaggctgccgtgctgctccacctgctgcacaacgtggtgcggccccaggaccagaccgtggtgtttgtggccacgaagcaccacgccgagtacctcactgaggtgagcagggtcctgagtgggaggagcacctccttcagctggagtttggagctgcagttccctgtgcagtcactagagggcagcacgagagcggaccaggagcctgggcctgggctcaagatggtcatttttatttttattttttatttttttgagacggagcctcgctctgccatccaggctagagtgcagtggcacaatcgtggctcactgcagccttgaccttccaggctcaaacaattctcccgcctcagcctcccgagtacttgggacttctggcgcatgtcaccatgcccaactaacttgttacttatttttatattttgtaaagacaggttctcactcggttgcccaagctggtcttgaactcctgggctcaggtgatcctcccaccttggcctcccatagtactgggattatagtactgggattatgaaaacatttctttttttttttttttggaaatggtatctcactctgtcgcccaggctggagtgcagtggcacgatctcagctcactgcaacctccacctcccaggttcaagtgattctcctgcctcatcctcctgagtagctgagacttcaggcgccaccatgcctgtctaatttttgtatttctcatggagacggggttttgccgtgttggccaggtgggtcttgaactcctgacctcaaatgatctgcccgtctcagcctcctaaagtgctgggattacaggtgtaagccacagcgcctggcctaaactttttattgtgagaaaatttcaaaccaattctaagatcagaaaataatatgatgaaccccgggtactcgttatctaggtacaactgttaccagctgatagctggtcttgaccttcatccgttagttccccttacatccgggttattttgaagcctgtccctgccatcctgttattttcctgtagatttttagtatgtggtttgtttgacttcttaagattgaggcatgacctgcatgtagcaagctgtgtgaagcgctgttagcatgtgtgagtggctcaaagatttttttcatatgtgttatgcctgtgtgacccccgcctgggtcaaagcctggggagtcgctgtgccccagaaggcagtggggcccctttccgttggtgcctgcctccctgtcagctacacctgggtctgttatctgaggacatggttcactgggtttcacttactccacacacagttaacaacactccctctgtgcagctgctggggtcaccagtgaataagaccaaaatagtaatttttaaacagttgtttttttagagagagttttgctcctttggccaggctggagtgcaatggcatgatcatggcttactgcaacctctgcctcctgggctcaagtgatccacccacctcagcctccgaagtacctgggactgtaggcacaagtcatgcctgaccatgccagctcattttttatttattttaattttttttgtagagatggtgtcttgctgtgttacccaggctagtctcgagtttctggtctcaagtgattttccagccttggtttcccgaaatgctggattacaggcgtgagccaccatgcccagtttaaatagtaatctgtaaagaacagctagcactctcatgagtgttccatgttgagactctgttctcagcactgtatatactgactcatgtgatcctcataataaggcacaaagaaggggcagttattcgtacagatgaggaaaatgaggcatagaaaagtttggtaacttgcccaaggtcacacagcttgtttgtagcagaatccggataaggcttgtgcactgaggtggcatttgcagcttccctgagagggccctctgcacacatcatctctgatcctcagacawccctgcagagaggtgggaggtgttgtaagctccattcctccccaaactggcatcacccagcaagctgggattcagaccaagggtgccagactccagaacccgtggtcttgtctctgcacctcagtgcccgtccccygccatggtctggcttcctttcctttctcctccaagtctccttctcactttgctaccatctttgctctgagcagctgctgacgacccagcgggtgagctgcgcccacatctacagtgccctagacccgacagcccgcaagatcaatctcgccaaattcacgcttggcaagtgctccactctcattgtgactgacctggccgcccgaggcctggacatcccgctgctggacaatgtcatcaactacagcttccccgccaagggcaaactcttcctgcaccgcgtgggtaagcagcccgtggctggccctggggcaggcaggggtgccggatcctggcagaagccgagggtacaaggcttaactcttgacactgcacatggggtggctgtgggccttgttttagagacagagcctcgctatattgcttaagctggtctcaaactcgcgatcgtgccactgcgatccagcctgggtgacggagcaagatcttgtctcaaaaaaaccaaaaaaaaaaaacaacccaattattcagcttatggtttttttgactttacaatagcacccatacagctgttctatttttttctttcagtacagtattcaataagttacatgagatactcaacactttattttaaaatcggctatgtgtgggatgattttgcccaagggtaggctaatggaagtatttggagcatgctcaaggcaggctggctgagctgcgatgtttagtgggttaggtgccgtgcgtgtgtttttgacggctattgggtttattgagacgcagcccttcgtaagtcacggaacagctgtggtctcatttcagagatcactgtcccccattgctctctgatgacatggccgtcattttggtgtgtgtccattcttctgatgtttctattttaagttgtggtaaagtagacatagcatgcaattcagcattttgccatttcccagtgtgcagtggagtggcattgagtctgttcccattgtgcaactgtcaccaccatctgtccccaaaacttttttttttttttttgagagtcttgctttgtaccccaggctggagtgcaggggtgtgatctcggctcactgcaaccttcacctcccaggttctagctattctcttgcatcagcctcccgagtagctgggattacaggtgctcgccaccaggcccagctaattttttgtgtttttagtagagacaggggtttcaccatgttggccaaggtggtcttgaactcctaacctcaagtgatgcatctgcctcagcctcccaaagtgctgtgattacaggcgtgagccaccatgcttggccccagaacttttccatcttgcaaaattgaagctctatccgtcagacaaaatctccttattcccctcccgcagcccctggtaactgttattctactttctttgccttcttttaattcataagtgtcatgtggtgggtgcacttcccccttgttgctgtctgctgtcccctagtttctgttgctgtgtggagagctggttctgcatgtccctagggaggtccccaggacgcccccaaagggaatttcttgtgcctcacaagaccaacagtgccggtcagacaacctcaaatgaaatctccaaatgtcataacaccttgttttcccaagatacagagacaaaccaaaatataatgctatgtagtgatttaggtacttcatgcaaaattgcaatcatattgggtgttcttttttataactggctttttgtttttttctttttacatcaccatacatcacgaatgtttttcgtttactatgaaatgtcattctgtgatgggttggcacatcttttctgtaaggggctagacatgaaacgttaggctttgtggaccatactgtctctgtcataactgttcatctctgctgctgtcgtgtgactgctgcctattcatttatatagataatatataaacaaatgagtgtggctgtgttccaataaatctttatttacacagacaagcagggggccgggatctcactctgttgcttgggctctagtgctgtggcatgatcatagctcactgtaagcttgaactcccagattcaagcaatcctcccagctcagcctcccaagtacttagggctacaggcacacaccatcacatctggctaattttcgttttttgtagacatggggtcttgctattttgcccaggctgttctcgaactcctggcctcaagtgattctcccacctcagcccctcaaagtgctgtgattacaggcgtgagccaccagcctggccctgtaggctgcagtttgcccactcttttcctgagctgtttaattcccactgtgtggccatcagctaattcacttatctagtcctctacccttgagactttagtttccaacttggggctgtcctagtcagggccacactaaacctccttgtgtgtgaatctttacatctttgcggggaattctcaaaagtggggacactgaagagttttgatcatgctcatgagcagggccttgctgtatttttgctagtctcccagagcactgtgtcagcttgggcacactctcacagatcaacctagggaccgggattaaacttccctgtgcgtaggtggggacagcagcygtgtgaggttcgaggcttggccaggctcacctgctcagggtctggcctgtggaactcatgctgggtccgggtccttctttgcttaattaagcttgaacgtctccttgctgcaggccgtgtggctcgggctggccgaagtggcacagcctactccttggtggcccctgatgaaatcccctacctgctggatctgcacctgttcctgggccgctccctcaccctcgcccgacccctcaaggagccctcaggtgagtggaggctgggtggggataggggtccccgtggagttcatgggccctgttttggctgtgggaggaggtrgggctgggtttgaccccagcagaagatgattccttttatttattttattgtattttatttgttttgtttattttttgagacagagcctcgctctgttgcccaggctggggtgcagtggtgtgatcttggctcacagcaacctctgcctcccaggttcaagccattctcttgcctcagcctcccgagtagctgggactatagatgcccgccaccacgcctggcaaattttttattgtatttttagtagagacaaggtttcaccatgttggccaggctgatctcgaactcctgacctcaagtgattcgcccacctcccaaagtgctgggattacaggtgtgagtcactgcgcccggctgattccttctattttttaacgagacggggtcttactcttgctcaggctggagtgcagtggtgcgatcatggctcgctgcaacttccaactcctgggctcaagcaagccactatgcctggctaatccctctattttaaactcaggatttcccacaacaatccagatttctggtatctactgggaaacagttggatctgggtgctaagctgtggcacccccattagacaggcttcctggtcccctgcagcccctgcctgcctccccttcctgtcagtgtggcctgcccagcccctgcaggcatctagtgtgtgaccctatacttgatgagttttcaggggagcgcagcggagggaaagagaggctgaggctcattcagaccaagcccacaggacatttttaatttatttattgagacagagtttcgctcttgttgcccaggctggagtgcagtggtgcaatcttggctcaccacaacctccgcatcctgggttcaagcgattctcctgcctcagcctcccgagtagctgggactgcaggcacacacaaccacgcccagctaattttgtatttttagtagagacagggtttcaccatgttggccacgctggtcttgaacttctgatctcaggtgatctgcccgcctcggcctcccaaagtgctggaattacaggcgtgagccactgtgcccagccgcccacaggacatttctgtatacatcctagaatgggaatgcatgggacagacaatagcaatcacyatggcctccatctgtgggcctccaactatgggcctccacctgyagtcctgctggttcccgggccctggacacatcttgtctcatttgtccatctgtgctagagggagggctgtcatcacctctgcttcacagatgagagaacggctctgacaggcctacccgcatgcacacagcagggaggtggggagctgagattcaggcccccccagaggcccaagactcaagctcagagagctgaggcggcttcctccggacagcctagccagtggtcagcagagagcgcagccctcagagctccgggccccctctgcctcggctgttcactcttggctgccagtggtggtctctgtccaggccacggccccctcaggtgaccatgtggccctgcagtgtcccagcccatgcctggaggcggctggaaagcagacaccatagcagaaagtctggggtcagatgcaagggcacaggaaagggctgcggggcctggccggggtggggggcggcctgtgcagtcactggaggtggaggcctcagtcgggcgccacgcaggggtgaattggaaggggcgcctaaagggcatttcaaagcattttcctgggggcaaagctgagagtgcaagggccaagggagggaggtgcaagcacagccccacctggcagccccaggggcccagtgacaggcaggagcaggaggaaatggaccctgcgcccagggccagaggcagcacgcagccccgtacaggctctacagatctgcagcctcctgggttgagagctgtgcatgggcgtgggaggggcagagggagggaaggagcctcccccaatgtccaggcagaaaccacccccggtgcagttagcttttagggagagacatcctgcatttgctccagagctagccaggggtcagcagggcccagcacctgcttaatctggagagatgggaagagggcaggctcctgacccagtgcagggttcggtttccgaccctgacccttaccacgtgccccttggcaaatctctaaacctccaggagcctcagtttcctcctctctaaaagggactcatcagggcctttcttgcaagattggccaaatgttggtaattaacgctgggtgatgggcccatgaggtccatcatgctcttccctcagctttttgtttttcttttgttgttttgcttttttattttatttcattttattttattttttgagaggggctcactctgtcacccaggctagagtatagtggcacgatcacagctcactgcgcccttgacctcctaggctcaagcaatccttccacctcagcctcttgaggagctgggaatacaggcaggtgccaccatgcctggataattttttaattttttgtagagatggggtatcactatgttgcccaggctggtattgaactcctgcactcaagcgatcctcctgccttggcttccaaagtgctggggttacaggtgtgagccaccatgcttggcttactgttgtatatattttgtagtaaaaagttagaacatgacgacaaaagaaaacaggtactttcctcataggtttggtgtgaggtaaaggagatgatgatgatggactcagcacagtgcttacacataggaagcctctgtccccggcatcctctgctcttaactgttgctgttacttattaccataagtattgctgttgttagtatggactctgcctagattgaatcctgtctctgcaactgactcatttgacagtcctggtagtaattgaacctcgctgagcctcagttttcttatctatagaacagggttgctgtggaaattgaatttctaatgctggagtcagcaaagttgctgttgtttgttttttgtttttgtttttttgtttttaagagagacaaagtcttgttctgtcacccaggctggagtgcagtggcaccatcacggctcactgcagccgtgagctcccaggctcaagcgatcctcctgtctcaccccctgagtagttgagagactacaggggcacaccaccatgcccggctaattttaaaatttattgtagacatggagtgtcactacattgctcaggctggtctccaattcctggcctcaagtgatcctcctgcctcagcctcccggaactctgagattataggcatgagccaccgcacccggccaacaaagttttttttttttagagccggatagtacatattctaggctctgtgggctgtgtgatccagggtggctcttcaaccctggccttgtagtgcaaaaacagctggagaccatgcgtaagcaagtagtgagctgtgctccygtagagctatttccagaagcagcaggcagctggccggccggccgcagtttgttgacccctgtcagtgtattcaagtgtctggctctctagctcctccctgagtgctggtgttctttgcagtgattattttrtagccatttacctgtgattcaggggccagggtgaggcccaagagtggtggtcgggcagtggacaggcgggccaggctgaaagacctctgacaaggtgctgtgtggggtgcaggtgtggccggtgtggatggcatgctgggtcgggtgccacagagtgtggtggacgaggaggacagtggtctgcagagcaccctggaggcatcgctggagctacggggcctggcccgcgttgctgataacgcccagcagcagtatgtgcgctcacgcccggygccctcgcctgagtccatcaagagggccaaggagatggaccttgtggggctgggcctgcaccccctcttcagtgagtccttctacaaggcagggggtggcaggtgggccttgctgaccccacccacagcctcacaccttgctgctttcctaccaggctcgcgttttgaggaggaggagctgcagcggctgaggctggtggacagcataaagaactaccrctcccgggcggtgagtggggccgggtggagaccacgctctgagtcctggctctgtggagcccagagacagatggcctgtggcctggggtcacacagtgacaacggtggtgccaggactcagattgcactcctgacccccagcaggaccccagcagggattttcatctgagcttcttatagcttcttaacctgcagccttggctctgacaacctctcttgagatgcaccttgttctggaaccatccctgctggctcacagcaggtcctatggggcagccattccctagcacttacagatggctcacaaggggaagtgacatgcttctggtctgttagaggcctgaagagctggctttcctgagcttctttccctccttcccaactgttgactcccattaggcaccccatcttgtgcatatggaaggggatgcacaaaaggaaagacctactgaggagtgagtaagcctgccagccagctaggatcaggagaggagctggagagagtgtcatgtttaagagcaccggttttgaagtcaaatggacttgggttgacaagctatgccttttcctagcatgtgaccatgggctggttactcaccctctctgggtttttgtttgtttgtttttgaaacagggtcttgctttgtcacccaggctggagtgcagtggtgcaatcatggctcactgcagccttgacctcctgggctcaaacgatcctcctatctcagcctcctgagtagctgggactacaggtgcatgccaccacacccagctatttttttttattttttgtagagatgaggtcatgttgcctaggctgctctcagacccctgggctcaggtgatcctcttgcctcagcctcccaaagtgctgagattacaggcgtgagccacggtgcctggcctgggtctctctgtgtttttgtttggttttgtttttgagatggagtctcgctctgttacccaggctggggtgcagtggtgcaatctcggctcactgcaacctctgccttctgggttcaagtgattctcctgcctcagcctcctaagtagctgggactacaggtgcccaccaccacacctagctaatttttgtatttttagcagagatggggtttcgccgtgttggccaggctagtctcgaactcctgacctcaagtgatccacccgcctcagcctcctcaagtgctgggattacaggcatgagccactgcgcctggtctgggtctgtctatctaattgtgaagtgcagataatggacactggggaagacttggggaagaacgcccataggaagcccaccaagtggtaagggtggggttaggagtaggaggccagtgggcaaaggactgggtgtcccctccacagactatctttgagatcaacgcctccagccgagacctgtgcrgccaggtgatgcgcgccaagcggcagaaggaccgcaaggccatcgcccgcttccagcagggacagcaggggcggcaggagcagcaggagggcccagtgggcccagccccgagccgcccagcactgcaggagaagcagcctgagaaggaggaggaggaggaggcgggagagagtgtggaggtacaggttccaccctggggaccctggacctggggtatggggaaggggtggctaagtcccagcagcccatgaggctgtcctaggatctttgagcagtggatggaggtggatgcagtcagcttcccatctgcagagtcggggcatggttcttgtccaccatccctcgtttaaaactctggggccagatctttagcctgaggagctgtgcacgacatgacaccctcagtggggtccggggcatcaccagccaccaaacacatcagggcttctgcagtgagacgtgtaggtctccactcagagggaggaccatgaagtgtcccattcacctggtgggtgggtcctgggcctgtgcgtcccccaggatgtccctctctcatgttttgtttggacagagggttcagtagccaagaagaccagttggagacccctggcctagtccatgttgttcagagcaggccaggcgcagagaggggcagggccggctgtcacatagcctggggtgcggagctggaatggggagttgggtctccctcggccggcactctcctcctcacccagctgtcctgcctctgctggtccctgaggcaggggttgcactgtgtgtgcagatgaggaaactgagggtcccacaggagacactgtcacccagctaagaaatggcaaaatgaagctttgaaagtccccgagaagccactggcccctcactgtggccaggctggtgggtagggaggcagggggaagtccccagggggcagcaggcatgacactgggccttggtctgtgctctgccaggacattttctcagaggtcgtgggccggaagcggcagcggtcaggacccaacaggggagccaagaggcggagggaggaggcccggcagcgggaccaggaattctacatcccctaccggcccaaggactttgacagcgagcrggggtgagtggctggctgggtcctgggtggggcagtygggtccgctgggtcccatcaatccaattatgtctcccactctccctctgcagcctgagcatcagcggggaagggggagcctttgagcagcaggcagctggcrctgycctggacttgatgggggatgaagcccagaacctgacgaggggccggcagcagctcaagtggtgagtgatcgagtgagccgcccctccatgctcggggtgagtgaccgagtgagctgctcctccgtgcctggggtgagtgatcgagtgagccgcccctccctccatgcccggggtgagtgagtgagtgagccgcccctccatgcccggggtgagtgatcgagtgagctgcccctccaggcccagggtgagtgagagagtgagctgcccctccatgcctggggtgagtgagcgagtgagcctcccctacctccattccctgaagtgagtgagcgagtgagccgcccctccattccctggggtgagtgagcgagtgagccacccctccaggcccagggtgagtgatcgagtgagctgccctccatgccagcaggcagggtgagctccctgaagtcctcactcccatctgatcctgcacagcccagattatggcctggctgtcccccatgtgaccactcacagcaggtgtgatggcccctggctgtgctgtccccttgatttgatcacacaccacagagatcttgaccccgtctattctttttgctggcaagtctttctagacagggctcaggacccattcgttcaggactctagcgtctggagagtgtatgtgactcaacccagggtcacagctgggtagggggaggggattggaaaccctccaggaggcccttgtccctgagccaggccccagtgctggcggcagtcctctgacctccgcactcccttttgagacctggactgcagggagaggtgaggagggatagggaagaagcctttattgagcgccaactgcatgccagacatggctgcactgctttcctttaatgctccaacaacctgacaagagggtcgggtgaggagacaggccccaagcggcagccggcactccaagggtttccctccacggcagccgtcccaactccctctcctgcagggaccgtaagaagaagcggtttgtgggacagtcaggacaggaagacaagaagaagattaagacagagagcggccgctacatcagcagctcctacaagcgagacctgtatcctgaggggcgtggctggggaggggcggggccgaggagcttcagcaggagcagcttcaattaagtggaacctgggggcgggggcgggggcggggaggagggggcggggctgagcggcttaagcagccgcatctccaatagatgggacctggtgctgggggcggggccgagcagcttcagcagcagcatctcsaactagtgggacctgtgctgggggcggggcccagcagcttcagcagcagcatctccagtaagtggggcctgtgctgggggcgggcccagcagcttcagcagcggcatctccaataagtgggacctggtgctgggggcggggccgagcagcttcagcaacagcatctccaataagtgggacctgtgtgctgggggcggggccgagcagcttcagctgcggctgggataacggaactctgtctgctggggcagtgtggggaggagccttctcccatcccaggggcttcacgcagcttccttaacgaggtttcccagctatcagaagtggaaacagaaacagaaaattgatgatcgtgactcggacgaagaaggggcatctgaccggcgaggcccagagcgaagaggtgggaagcgagaccgtggccaaggtgagagccagggtggggagtgtgggtgcacaggtaggcagagcagttgtggtcagattagggtaacgctgaggcacaggtgcaggggctactgcagagccccagagctgggtgtgttggggtatgctgccaaaaccctgggtccctccatgatcccccccacccaacccccacacccacagtttcccccttcctactgtcccggcctctgatggtcacgagcaccgcctgacaggcgctgggaagtgccatgcccctcaggtgccttgtccccgacccccttccacttcacagatgaagctacagggataacttctggtagatgccctgttcacctaattaagccgattgtgtaaaatcctagagaacccgggaggtggaaccttgtgcaaatgcaggccattttcacctgcaaaaatggcatttgcatgtggttcgacctgacagtgagcatgaattgattccctgtggcatccttaggagtgacgttctttttagcaatgctgtggggaagttcatgtcaccaaagacgcagtcagaagcagctttggttctgggaggaggcgatcacaggggatgttgaggaagatacttccttgaaatgtgggttggcaagtggtacatttggtcatctgaggacttggacctctttgatctggcctgggtccctcagccagtaacaagctaaggtggatttgaagccggctctgtctgccagagcctgtgcttaagggctgttatcagggaggggctcccgcttgctgggtgcaggcaggctctgtcctggaaggccacacatgacctgggaggcaaggtgactgcgaatacccattttacaggccaggaaacaggtgccttatgagggctatgactgaacctgggtcacccagctgcccaaggctcccacctggagtcttccctggggagaggggagtttgggaccatgtcttgggtctctctcagatggccttagcccctgcttgtgtccctccacctcctggggctggtcactgcctcccctgggtgtctctgtgagcctgcgtgcatttgcctgggcctgttctctgtggctcctccctctccagctctcccatctgtgggagtgtctccttgtcagcatggctgggtggggaccacccacacctcacttctcagcctgtttttacctaggtgaaacagcagcttctgctgcgagcattgccgtgcagtgggcgtgcaggggctggggagacgggggcgacctgtgggctttgggaaaaagcagctgttcttcctttgctgtcctcattggaggtgataggtcctgcgaggcaccctggctccattggagacagctgggaccaccttaatggtcatccctctaggagccctggggaggctgctgttatgaatggggaagaggaggaggaggacacagggcttagtgggagccagggagggtggtgcttgcctcccggagaactagaagaatggactacctgatgcccacctgtggggctggggcagggtcgctgacctctgctgctgctgctgctttgctgtgtgatctcagataagtccctctccctctctggccttctttgattcctctcccacctaaaggaaggttcatctacactcttttttcatctaacaagcctagagcatggtgtccatggagacagaggctgaggtctgtatcggttactatggggggcctcagagcctggcgtgccgtaggtgtgctgtggagacatacactccttggttggagaatttttaatagtaacagtcatgcccaaaaggctcccactatgggacaggccttgaaattctgaccactttacaccatggaaatgcatttactcttcacccatgagggaggtgctgtgatttataattcatagatggggaaactgaggcacagagccgttaacttcttgcccacggtccaagaggtcacagctgggatttgaaccccagcggttctggccccgtgttattgaccactccatgaggctgcctaaaactttattagccacctactgtgtacagacactgggccacagcaataagcacagaacaggagtaggggcaggggaggagtctgcaagcttctgggaggaggggatcttgggagtgatcccaacagctgagctccctgaatccctgtcccagcaggtgcatcccggccccacgccccaggcacccctgcaggccgagtccgccyggaactcaagaccaagcagcagatcctgaagcagcggcgccgggcccagaagctgcacttcctgcagcgtggtggcctcaagcagctctctgcccgcaaccgccgccgcgtccaggagctgcagcagggygccttcggccggggtgcccgctccaagaagggcaagatgcggaagaggatgtgaggaccaggacccagccccgtggctccttgattggccttagggtgggcatcagcagacgttcccgtgcaccactgtgtgcctggccctgtgctgggcactgggggcactccctgcaggagccatcatctgtgaaaaggagcactgtatggccacagaagggcagcagctgcgtcagcctaagacagagacatttgaacagggccttgaagggtgtgcaggagttcgccagcaaagccaggcaggccaagacttgagttggcaactcagctgctgctgcttccatgtgttctgggttcagaggtcatggctgcaccggtcagagccctgagtgcctcagggtttggcaatggaatttttaatgtaataaatctttattgagcactgctggtggccaggagtgcggtctacttggggaactggaatggagagacccaggtactaaaatcccagctaacgtggcagaggagttgcgggtctcctgagggtgagttctgctgccttgtccatttagcgatgaggaaagtgaagctcagagcacaaaccaggtgccagaggcgggagttggtcccccttcctcccactggacatggttgcagctgggagtgggctgggggaggggaacaggatgcccagcccagggggcaaggacacagctgctcccctctggctatgaagaggttaacgcggcccctccacacctggaggtcagaacctggcctgtcctctgtcttcttgccacccaccccctgtttgaggttctgagaaggtcaagggcagccccagcagctggattctcaggctgggcccctcacctggcagagtccatagtggagggggccttggtgatctctcatctagcatggaccctgttctgagacctgacaaagagttttttttcatgccccaaccaccctggcagggagggcctggtctgatctcattttagaggcagttgccccacacatagccccttgaccttcccatcacctcctcatcagggcctgcatttatggagtgcttgctatgtgcccctcatggcaggcccacagcactctgaacaggcacagccctcccatcttcccaatgaggaaacggattcaggaagagccactcagtccacaccccattggaaatgtgggccctcctatctcagggtctctcaggggttccctctcccgctgctcacctgtgtcagggctaggaggcaggggctgcaggctcagcctgacccaggccggccagcatggcagagaggtcctgcatgaacagcttcacctgggggggcccagcacgaagtcacatcccagccccagagtcactgtccagcccccacccctcaacacgcgggggaggccgaaaggtagggcggggactggagatcccctcattaaaagaacagtgatgatggtggttcccagaggtggtgactgagatcctaaaccgttctgggttttgaaagcctcaggccaaccttcccaactgctgcgtgagcagacaccttcacagcttcctcgctgctgtcacctgcactatccaattagtattttcatttacatcaatcagctttattttcttgtaactggatcagtcatattcattggtttgtgacctactcttatctccgtgggtggctctccttttgttttaattaacttctttatgaatatgaacttaataaataccatggatccattgtaaaaactagaacttgagggtgaacttacaaccatctgtgggctccccctcatattcatcaccgtatcaacagctgagaaggaaactttttatctccaccaaaaatggaaaaaaatagttaccccttgtcataactagggggcaactggaaaaataatgcaatgaacaaatgaagctgttactgaattctggcagccgcaggacagtgtgagtcccaggcccggaggccagggagtgttaggggaggtgggaaaaggcatcatgtccctccgtggagcctttctccttgacgggcagagagttgattttgaaaagagatggtctggtcctagtgcagtggtgtttacaacgaattaattacaaccggttacagattttgtttcttcttaatttccactactccagttggactaaaagaaaaggcactgacttttgcctgtttacatcaagcctgtgtttctgctagtctcatgtgccacaaggtaacaggccaggcttggaagaacagtggcatcgatgcatccaaccaactaggaggggcgaagcggattcccaggacccagatcttggcattcggttggaatcctggccattgggcagaacaggaatgggaatcggttggggaaaaggtgggatgcctccctttgtagcaggacgagccgcagacaaaactcctcagacaccggattaacacaaaactcctcagacaccggattaaagaaggaagagttttttattcggctgggagcattggcagactcgtgtcttaagagccgagctccggccgaataaaacctcttccttctttaatccggtgtctgaggagttttgtctgtggctcatcctgctacacctttacttttcctccagttctcaaaggggccatgctttgggtatacccactagaaacaaaagaagtgtttgaagtctgaaatcttcctccattgtaaacctatgtcacgctgggtgtggtggctcacacttgtaatcctagcactttgggaggctgaggcgggaggataacttgaggttgggatttcgagaccagcctggccaacctggtgaaaccctagctctactaaaaatacaaaattagccgggtgtcgtggtgtgtgcctgtaatcccaactactcgagaggctgaggcaggagaatcgccaggaggcagaggttgcagtgagccgagatcgtgtcactgcactccagcctaggtgacagaactagactctgtctcaaaaaaaaaaaaaaaagcctatggcacattctacaccacacaactcagcctaaccccaccctcaccctccctgcggaagctgaggcctctctgtgcaggaagcagggagacagagggccagagattaatgaagagcgagtctggacctcatgattttttacaggtgttgacacgtgtgggctgttggatcctgtgagaaaagagggactcagcacaaaccctggccttcctggtagagggagggcattgagaccagccactttttttttctttttgagatagagtctagctttgtcgcagagaggggcatggctttcttctggccactgtcagagccaagatgcacccaggaatccatcctagaccgggtgcctgcccgacaatcgagccacggctggggcaagggctctgaccgtagagggccatgcttaacccagagaaggtgtcactaactgtggggttttaggctcatttttccaaagagggagtgtttgggggctggaggtgccataaagaggggtcctcacgtgctctagctgtccctccgtgtcctcgatgtccagggtgggaggctgcccctgatgctggcacactagctggaacaggttgagcacagccatcctgctgcgtcccaggagcagagtcttctccgctgctgtgttctgaatctgaatccacttggattcctggagaacacccgccccactcccaattatggcaactgggccaaggcgggctgccccctcttcccagccactttttttttttttctttttgagatggagtctagctttgtcgcccaggctggagtgcagtggcctgatctcagctcactgcaaccgccggctcccagagcctagcgattctcctccttcagcctcccgagtagctgggagtacaggcgcccgccagtggacctggctaatttttgtatttttagtagagacagggtttcaccatgttggccaggctggtctcgaactcatgacctgaggtgatccgcccctttcggcctcccaaagtgttgggattacaggcatgagccaccgcgcccggcattcttcccatccacctctgccagtcaggcagtcaggtgctctcgggagtggggtgcaggagccttgtgcaggcggatggggcggggcctcatgcccgaaacggctcggtgatgcctgagattcccctccttagtgcagcggaccctctggggtaagcattgccccatcggtcctcatcagccctggcgttcctccccgcccggctgtggaagcctggggtccggagcgccccccacctagggcgggtcgtacccactgcagcgtacgctccctggcagcctccaggcgctcctgcagctgtgcccgccgctggccctgtgcgagcacctcgtccggccaggcgtcccgcagctgctgcagccgcgctcgcgccgcctccagctccgcgagctgctcgcgctccctgagcctcagcgccgcctgcgtctcggccaggccgtcgaagcgcgccaccagctccggaacctcttggaactagagtcgggggcggggaagggactcacatgggcctgcagtgccttaccctctccatcccacctggccgccagcgttccttattattggaataatctttctggaaagtgacttaaatgtcaacctccatttgttagagacaaggtctcgctctgtcacctgggctggagtgcagtggcgcgatcatagctcactgtcatcttgaactcctgggctcaagcgatcctcccatctccgctccaaagtagctgggactatagtcacacgccaccacgcccgactaattttttgtagagacaggtgtcactctatgttacccagactggtctcgaactcctggcttcaagcaatcctcccgccttggccccccaaagtgttgggattacaggcgtgagccaccgcgcccggccagagttagctttctgaatcttcagttctcctatctgtaaaatggggtggacagttgacaataacaggacttacttcactggactttggggaggattcaagaacaaagcgtgggcggtggctcacacctgtaatcccagcactttgggagcggaggtggcaggatcgcttgagcccaggagttcgaaaccagcctgggcaacatagagaaaccaccgtctctactaaaaataataatttaaaaaaatagctaggcgtggtggcgtgcgcctgtggtcccagctacttgggaggcagaggcaggaggatcccttgagcccaggaagtcgaggctgcagtgagccgtgatcgcgccaatgcactccagcctggtgacaaagcgagacactgtctcaaaaaacctccaaaactaacaaccacaaaaaccaaagcgtatcccttgcttacagtgagcgctccataagtgatagttctcggcatgcatgccaagatctccagtagttcagcgaaccagtagttcgccggtccgaagccgtccctgagccactcagcgccacgcggtggcgccgagctcccagcctcctgccccggactcaccccgggcagcagctccagcgcttgctccagcaggcgcgcgcagggctccaggcgcttaagccggcgctgcasccgcgcgtgttcccgccgtagctcctggagctgggtccacagacgcagcgcctccacctcccgacggcccgcctggtgcctctcctccgccgccctccgcagcgcgcgattgcgccgggcctcggagtcctggggagtacggtggggagaagacgaccttcaggactcaggagctggcggggagttcggcacctccatcctgccctgacattcgctcgcaaaaccaggggcggccagcaggcctggctcggaagctggctcttcacccaactcccccgcccgctttttttttttttaatcggttgcttcaggcagtgcgtgtgtgtttcccgccgtttccttttgcatgacgaaaaccacttcttttatttttgttacctgccgggcccctataggagtgtgggctgctacccataggccccgcctcccccccaggaggctccacctacctgcaaaaacttgtcaaagcggatgaacgatccctttagctcccgctccttttgttccagctgttcccaacgctgtttcagggctgccgtcttggtgcggaacacctgggggtgaggagtgggttgtctgtgtgggttcgggggtccgggtcctcccatgctgtcaggttcacacctaaccccttccacctgttgtccctgatctgtggctgctccctgctcaacccatccggggctcccatcacccagggatgaagcccaaacaccctcctccagccctcgaatgccagtgtccctgcccttccttcaggcctcatcttaccctctgccctcccatattctgtcttccagccactcaaccacctgtgtttggttcttgccttccaaccagtctttgtgtatggttttcctctgcctgtttttccttcctcatctgtttcacctttgctggataagccgacttgcccttcagcaatccccaagacatcacttcctccaggaagccctccttgaccacccccatggggaggtagggacttctgggcttccacagcccctgcccagtgcttcttccctgtagcagtcaccacctgaacacttatctgttttcctctctagactgtgagccccacaaggccagggactatcgtaagacctccagggcttaatgcagtgcccagcacatgctcaatgcacacaaatttatttgcaccaacaactggtctcatttgatccccatttgacgatgaggaaatcaaggcttggagtggtgaaatgacttgtctcagaccttgtcactaataaattggctccatcacttcccatccaccagctcaccacctcgttacagtagtgggggctcacctccttctgggcctgcagggcctggtctgyatctaccagctcttgcctcttctccaggagacgcagtactggtgggacatgatcctcagcctgctctggcagctttctgaagaggctcaagtaggaggtgggggtgaaggaagcatgtttcagggccccacatctcaccactgtgtctggagtgccccattagccacctgctggctgtttaattttttttttttttttttgagacttgtttttgggtcttgctttgtcacccaggctggagtgcagtggtctaatcatcatagctcactcctgggcttaagcgatcctcccatcttgtctcttgagtagctgggactgcaggcatgtgccaccacacccggctaatttttatttttttatttttgtaaagatgaggtcttgttttattgcccaggctggtcttgaactcgtggactcaagcaatcctcctgcctcagcctcccaaagtgttgggattacaggcataagccaccacatctggttgaattattattattattatatagtttttgagatggagtcttgctctgtcattcaggttggagtgcagtggcacgatcttggctcactgcaacctcccgccttccaggttcaagcagttctcctgcctcagcctcccaagtagctgggattacaggtgcacgccaccatgcccagctaatttctgtatttttagtagagacagggtttcaccatgttggctaggctggtctcgaaatcctgacctcatgtgatctacccaccttggcatcccaaagtgccgggattacaggtgtgagccaccgcacctggttgaattctttattcattgaacaaattgr

SEQ ID NO: 94635 - DNA, 12665 bp, Homo sapiens
agggaagccgaggtgggcagatcacttgaggtcaggagttcgagaccagcctggccatcatggtgaaaccccgtccctactaaaaacacaaaaattaactgggtgtggtggcgtgcacctgtaattccagctacttgggaggctgaggcaggtagaatcacttgaactcaggagacagaggttgcagtaagctgagactgggccactgcactccagcctgggcaacagagtgagactcccatctcaaaaaaaaaaaaaaaaaaaaaaaagttaaagaaaacaaagaattataaggtcaaaaaggatctcaagagattctccaaccttttctcaggtgaagggggctggatttccaccttcatcctcctctctatcacctaaggaccccatatgttgaccgggtgtccacctggaagtcatcctctgttcctccccgtcctcgctttccacacccagttctgcctgtccatctgcaaagtgtagcccaattcccacccccaccccctcattttcacctctgcaattatatctctaggtgcagccacgcactaccctctcttgcctgggattactgcatgaacctccaaactggacctctattgtcaattttctacccagaagccaataagccaatgttatctttttaaaaaaatttttttgagatggagtcttgctgtatcacccaggctggaatgcaatggcgcaatcttgactcactgcaaccatcgcctcccaggttcaagccattctcctgcttcagcctcccaagtagctgggactacaggcacgctatcacgcccggctaatttttcttatttttagtagagacagggttttgccatgttgcccaggctggttctgaactcctaaccttgggtgatccacccccctcggcctcccaaagtgctgggattacaggcgtgagccacggcaccagcctaatgttattttattttattttatttatttatttatttcgagacggagtctcactctgtcgtccaggctggagtgcagtggtatgatctcggctcactgcaacctccgcctcccaggttcaagtgattctcctgcctcagcctactgggtagctgtgattacagtcacacgacacaacacctggataattttttgtatttttagtagagacagtgtctcaccatgttggccagtctggtcttgaactcctgacctctggagatccgcccccctcggcctcccaaagtgctgggattacaggcgtgagtacccggcaatgttatggtttttttgttttttttttttagtatttattgatcattcttgggtgtttcccagagagggggaagtggcagggtcataggataatagtggagagaaggtcagcagataaacacgtgaacaaaggtctctggttttcctaggcagaggtccctgcggccttcggccttcagcagtgtttgtgtccctgggtacttgagattagggagtggtgatgactcttaaggagcatgctgccttcaagcatctgtttaacaaagcacatcttgcaccgcccttaatgcatttaaccctgagttgacacagcacatgtttcagagagtacggggttgggggtaaggttatagattaacagcatcccaaggcagaagaatttttcttagtacagaacaaaatggtgtctcctatgtctacttctttctacacagacacagtaacaatctgatctctctttcttttccccacatttcccccttttcttttcgacaaaaccgccatcgtcatcatggccctttctcgatggtcgctgtctcttcggagctgttgggtacacttcccaggcggggcggcctggcagaggcgctcctcacctcccagaaggggtggtggctgggcagaggcgcccctcacatcccagacgatgggcagccgggcagaggcrcccyccacctccctgatggggcagccgggcagaaacgccccccacctcccagacggggtgtccgggcagaggcgccccccacctcccagatgaagggcggccaggcagaggtgctccccacctcccagacgggggagccgggcagagacgcccctcacctcccagacggggtggctgggcagaggcgcccacttcacagacggggcggccgggtagaggcactcctcccagatggggtggcggccgggcagaggtgctcctcacatcccagacagggtggcggccaggcagaggcgctcctcacctcccagacggggtggtggccgggcagaagcgctcctcacctcccagacggggtggcggcagggcagaggcgctcctcgcctcccagacagggtggcagccgggcagaggggctcctcgcttcccagacggggcrgccaggcagaggtgctcctcgcttcccagacggggcggccgggcagaggctgtaatcttagcactttgggaggccaaggcaggcggctggaaggtggaggttgcagcgagccgagatcacgccactgcattccagcctgggcaacactgagcactgagtgaccgagactccgtctgcaatcccagtaccccaggaggccgaggcgggcagaccactcgaggtcaggagccagagaccagcccagtcaacagggcgaaaccgtgtctcctccaaatatacaaaaaccagtcaggcgtggcggcgcgtgcccgcaatcccaggcactcggcaggccaaggcaggagaaccaggggagcccggggcagggaggctgcagcgagccgagaccacggcagtacagtccagccttggcaacagaaggagaccgaagaaagaaagagggagcgggtgagggggagggggagggggatgggggagggggagggagctgttatgttttttttttaaaaatcaactttattgggctaagtgcagtggctcatgcctgtaatcctagcactttgggatcttgacatagctgatctcagatcttggcatagctgttcacgtgccacctctgtgggtcctgaacattttatctaaagtctccccgtaccccaccaaatcagactccttaccctggtatttgttgaggttcaccttctgccattatattctgcgtttatttgtgtacttgtttattatttgtctctgcctcccccattaaaatgtcagggctatgagaacagggactatgtctgtcttgtttgctgcttgttcaccagcatctggaatggtaggtttgagtaactatttttgaacgaatgaaagactggcaacatggagatgccaggagatgagtgagctgggctgcataattagttgtagcatcaggatgaaaaccccaatctcctggcccccagcccaaacctctctcctccttctcaggccattcacagatcttcccaggactgacacacaagacagtacaggggtcttaactgcagtggttttttttttttttttttttttttttttgagacggactctcctctgtcgcccaggctagagtgcagtagcgcgatctcagctcactgcaagctccacccctcgagttcacaccattctcctgtctcagcctcccgagtagctgggactacaggcgcccaccaccattcccggctaattttttttttgtatttttagtagagacggggtttcaccgtgttagccaggatggtctcaatcttctgacctcgtgatctgcccgtctcagcctcccaaagtgctgggattacaggcatgagccaccatgcccggcccgtttttttgtttgtttgtttgttttccccaagatggagtcttgctctgttgcccagagctggagtgcaatggcacaatctcggctcactgcaacctccgcctcctaggttcaagcaattctcctgcctcagcatcccgagtagctgggattacaggcgtgagccaccacacccgggtaatttttgtatttttagtagagatggggtttcaccaagttggccaggctggtatcgaactcctgacctcgtgatccacctgcctcggactcccaaaatgttgagattacaggcgtgagccaccatgcccagccgcagtgctgtttttaagagcaagagactggaaacaactcaaatgtccatcaatagggggctgtttaattaaatcacatacagttctacaacggaaaattatgtagccacagaaaagatcccaggaagctcaaatgtactgaaacgaaacagcttccaagatctgaaaacataacactgaacgatgtaggtaacgtgtgtatcatttgtgggaaaaagtgggatacaatatgattataagatacttatacaggccggcgcggtggctcacgtctgtaatcccagcactttgggaggccaaggcaggcggatcacaaggtcagcaggtcgagaccagcctggccaatttggtgaaaccccatctctactaaaaatacaaaaattagccaggcgtggtggcttacgcctgtaatcccagctactcgggaggctgaggcaggagaatcacttgaacccggagggggaggttgtgttgagcagagattgagccattgcactctagcctgggcaacaagagtgaaactccgtctcaaaaaaaaaaaaaaaaggtacttatacaaggctgggtgcagtggctcacgcctgtaatcccaacactttgggaggtcagggaaggtggactgcttgagcccaggagttccagaccaacctgggcaacatggtgaaaccccatctctaaaaaaatacgaaaaaagttagtcgggcatggtggtgggcgcctgtagtcccagctgctcaggatactgaggtaggaggatcacttgagcccaggaggtgaagaatgcagtgtgccactatactccagactggaggacagagtgaggctgtgtctaaaaaaaaaaaaaaaaaaaaaaaagataaaaaagatacttatacaaattaaattgaaacaactctggaagaatgcacactaccaatgttaactggctagggttggggctggaggaatggggtggctgggaatcaagagtagaaaggagatttcactaagtactcttttgcatagtttgaatttttttttttaggggcggagtcttgctctatttccaggctgcagtccaatggcacgatctcggctcactacaacctccgcctgctgggttcaagcgattctcctgcctcagcctcctgagtagctgggattacagatgcatgccaccgtgcccagctaattttttgtatctttagtagagatggggtctcaccatgttggccaggctggtcttgaactcctgacctcgtgtaatctgcctgccttggccacccaaagtgctgggattacaggtgtgagccattgagctcggcccacatatgtaacttaatctattgctaaaacaaattaatattttacaaaaataggccaggcacagtggctcacacctgtaatcccagcattttgggaggccgaggcgggcggatcacgaggtcaagagttctagaccagcctggccaacatggtgaaaccccgtctctactaagaatacaaaaattagccaggcatggtggtatgcctgtaatcccagctactggggaggctgaggcaggagaatcacttgaacccaggagtgggaggttgcagtgagctgagatcgcaccattgcagtccagcctgggtgacaagagggagactctgtctcaaaaaataaaaataaaataaataaataatttttaaaaagtacatttaaaaaaatgtcactactggacgggtgtggtggctagtgcctataatctcagcacttagggaagccaggcgggaggatcacttgagttcaggaaaacagcccatctctacaaaacattaaaaaattatccagttgtagaggtgccaacctgtagtcctaggtactggggatgttgaggaaggaagattgcttgagcccaggagttggaggctgcagtgagccatgatcacaccattacactccagcctgggtgacagagcaagtccttgttccaaaaaagaaagagaggagcgcagcactgccgyccggcccctccagcttcccggaccacggccaacctcgagcgcaccttcatcaccatcaggccggacagcatgcagtgcggcctggtgggcaagatcatcaagcgcttcgagcagaaggggttccgcctcgtggccatgaagttcctcccggcctctgaagaacacctgaagcagcactacattgacctgaaggaccgcccrttcttcccygggctggtgaagtacatgaactcagggccggtcgtggccatggtctgggaggggctgaacgtcgtgaagacaggccgagtgatgcttggggagaccaatccagcagattctaagccaggcaccattcgtggggacttytgcattcaggttggcaggaacatcattcatggcagtgattcagtaaaaagtgctgaaaaagaaatcagcctacggtttaagcctgaagaactggttgactacaagtcttgtgctcatgactgggtctatgaataagaggtggacacagcagcagtctccttcagcacggtgtggtgtgtycctggacacagctcttcattctactgacttagaggcaacaggattgatcattcttttrtagagcatatttgccaataaagcttttggaagctggaaaaaaaaaagagagaaagagagaaggggagggaggggaggaagggagggagggaggaaggaaggaaggaaggaaggaaggaaggaaggaaggaaggaaggaaggaaggaaggggaaagttaaatagaaagaaagagacacagacgggccgcgagcggtagctcatgcctgtaatcccagcactttgggaggctgaggtgggcggatcacaagatcaggacatcaagaccatcgtggctaatacagtgaaaccccgtctctactaaaaatacggaaaagtagccgggcgtggtagcacgtgcctgtagtcccagccacccgggaggctgaagcaggagaatcagttgaacccgggaggcggaggttgcagtgagccgagatcgcgccactgcactccaggctgggcgatagagtgagactccatctcaaaaaaaaaaaaaaaaaagaaagaaagaaaagaaagaaaaaagaaagaaaagaaaggcagtacagacaataacaagaggggcctcaaccgctcaagagtgattcaactgagacttgaaaacatttcctggaaaagagctaaccctagcttgatgttttgcgaaagggaggctgtgggaagagcattctggaaggaggggttggtatttggaaaggtatgccgagggccccagaataggggtagtaagacggaaagtttccagcctcccctggcttatctcaaggaggagcctcatggctcagagggtgggtcctaccaggcccttcggccctctaggagaggctcctcgtgtccaggaaacccaaaacaggcaagggtttaaatctcagttctggctgggtgcagtggctcacgcatataatcccagtacttcccaggctgaggtgggtggatcacttgagctcaggaggtcgagaccagcctgggcaacatggcgaaaccctgtctgtaccaaaaaaacaaaaaattagccaggcgtggtggtgggtgcctgtggtcccagctactcgggaggctgaggtgggaggatcgcttgagctcgggaggcggaggttgcggtcagctgagcttccaccactgcactccagcctgggtgacacagtgagaccccatctaaaaaaaaaaaaaaaaatcccagttctatttgccaactgtgtagtctttggcatgatacctcatctttcacctttctgagcctcacttttctcttcagtaaaatgggagtgaggttctacaggtttaatacttagtagttgtgtggtttgagaccaagtgacttgaccactctgagcctcagttgccttctttgtaaatctggataataaaacatatatatgccttccatggctgttatgtggatttaacaacaaaaacaaaaatgcacaaaaagggctgagaaattgtagctattagcatcattgaagaaccgaggtgagactttagggctaagagggaaaaggacagatttggggatttatccagccacccaagtgctgaatcgagttgttgtgagttaataataaatattattattattgagtacacattgtttaacacgtgtaaagcatcacgttaagtctttaaaacctaatgggtgttttatgtcctatttacaggccaggaaactgaggcttattaagtaaagtcacctgctcccagctacagctacaaagtggaagagtcaggattcaaacccaagactgtctgactcatgaaggggagtgtcagggttgtgccacagcctttgggcaagtccaggattcccagccgacttggacacagtgccttgggaaggctctggttgcctctgaatttgggagaaggacacagtctgggttactgccctgcataaaaccttcatgacaccagaataaagcccagtggtttttcatgatctcattggaggacccagtatgtacctcctcaccaactctctctacttcctcccttctcagctccactcactgggaataattttcaggttgttcaataagccttgttgggccgggcgtggtggctcatgcctgtaatctcatcactttgggaggccaaggcgggtggatcacttgaggacaggagttcgagaccaggctggccaacatggcgaaaccccatctctactaaaaatacaaaagtcagccaggcgtggtggtgcatgactataatcccagctactcaggaggctgaggcaggagaatcacttgaacccaggaggcaaaggttgcagtaagctgagatcgtgccactgtactccagcctgggagacagagcaagactccacctaaaaaaaaaaaaaaattggccacgatggccaggtatggtggctcccgcctgtaatcccagcactctgggaggccaaagcaggtggatgacctgagatcgggagttcgagaccagcctgaacatggagaaaccccatctctactaaaaatacaaaattagccaggtgtggtggcgcatgcctgtaatcccagctactcaggaagctgaggcaggagaatcgcttgaacctgggagacggaggttgcggtgagctgagattgtgccattgcacttcacctggacaacaagagtgaaactctgtctcaaaaagtaataataataaataatacaaaaattagctgggcatggtgatgcatgcctgtagtctcaggtatttgggaggctaaggcacgggaattacttgaacccgggaggcggaggctgcagtgagtcgagattacaccactgtactccagcctgggcaacagagagagagactctatctcaaaaaaagagacaaaaacaaacaaacaaacaaaaacaccgggcacagtggctcacgcctctaatcccagcactttgggatgttgaggtgggtggatcacttgaggtcaggagttcgaggccagcctggccaatatggtgaaaccccatctctactaaactacaaaagtagctgggcgtggtagcccacgcctataatcccagctacttgggaggctgaggcaggagaattgcttgaacctgagaggtggaggttgcagtgagccgagatcgtgccattggactccagcctgggtgacagactgaaactccagctcaaaaaaaaaaaagaaagaaagaaagaaagaaaggaaaaaaaggctgggctcacgcctgtaatcccagcactttgggaggccaaggcaggcggatcacctgaggtcaggaatccgagaccagcctggtcaacatggtggaaacccatctctactaaaaatataaaaaattagccaggtgtggtgacgagcacctgtgatcccagctactcgggaggctgaggccagagaatcgcccgaacccgggaggtggaggttgcagtgagccgagattgcaccactgcactccagcctgggcaacagagcaagactctatctcaacaacaacaaccacaacagaaaggccacatattcctgactccaggcccctgccagtgctgttaccactgctaaaatccatcctgccctctttgtcccggttaatgcctctcctccttcagttcacagctcagctacccccttcttcaggaagccctccttgacaactacccaggcttagctagtcagtcccatgaccaccccatccccactaaagtacttaactctgaaacaggcaccaaaggaagcactcttcccatatctcacttaatactcaccaaatctctggccggtcgtggtggctcatgcctgtaatcccagcactttgggaggctgaggcaggtggatcaggaggtcagatcaagaccatcctggctaacacggtgaaaccccgtctctactaaaaatccaaaaaattagccgggtgtggtggtgggtgcctgtagtcccagctactcgggaggctgaggcacgagaatcacttgaacccaggaggtggaggttacagtgagccgagatcgcgccactgcactccagcctgggcagcagagcgagactccatctcaaaaacaaacaaacaaaagatactcaccgaacctctctggtagtgggtctcatctttgcagaaacattggaagctttaacacacattttttttgccctgacccattcctcagaaattctgatttaatgggtctggaatgcagccggggcacagggatttttgtaaagctcctcaggtggttttcttgcacacacagtcagggtggagacctaccgaactctgagatagaatcaggactctttttgtttttacagccagggacactgaagcatgagagggtagatgagtggcttaccgtcatgcaagtagagaataacgaagcaaggtcttgaacccaagtctggcttcaaagcttcatgggggaaaaaaaaatcagttggcctcagttaatttcccagcaatggagaaactgtagagcttagagccagctctgttttgagacagacactgagggccccttgggcatgggatatttttaacctagaagctggtgattcttgctaacattctgcagtgccttgaacactgagcagattgtttaggggtctgtgggctctttccctgctgagatagcccttgtagtagggcttttccatcctctggagccagtgggtgggagggtgggtgggggttggcctcatggcgggtggggtggctaatgtatccaaggatattacctacatggtggatagggagaaggtcagttttggatgagcccagatttctcctccctccgagacattttatctcacccaacacagccccttctcccttctctccacctggaaaacagctggaagacaaacctaggttgaagctggattgtacactcagcgcctcaggaaaatggatgcacgttcaccctcccgcttcttcccctccctgacccgtgacagccccgtgaaagctgcagaacacttacaaatgtatgtatcaggccaggcgcggtggctcacgcctgcaatcccagcattttgggaggccgaggctagtggatcacgaggtcaggagttcaagaccagcctggcaaatgtggcaaaactccatctctactaaaaatacaaaaattagctgggcgtggtggcacatgcctgtaatcccagctattcaggaggctgaggcaggagaatcgcttgaacccaggaggcagaggttgcagtgagctgagatcgcaccattacactccagcctgggcaacagagcaagactccgtctcaaaaaaaaaaaaatatgtatatgtcaaaccttctccagctgtcctcatatgtgatttgttgggcaaatacattggtatagtcttaggggtgccagtatagggatatcccttaaaacgcaaaataagcatggcctttgaggaggcaattctacctatagaaattttccccacgcccagattacctgaggcgaggagatcgagaccagcctgaccaatatggtgaaaccctgtctctactaaagatacaaaattagtcaggcgtggtggcaggtgcctgtagtcccagctattcgggaggctgaggcaggagaatcgcttgaacccgggtggcggaggttgccatcagccgagatcatgccgctgtactccagcctgagcaacaagagcaaaacttcgtctcaaaaaaaaagaaagaaagaaagaaagagatttctccccagaaataccccaagagtaaggaaagatgacgtagcatcaagcgtattcattatagcattgcttatgggaaaaactggaaacaactcacgtgtccaataatgggggattggttaaccttggtaggtcacatccatatgggaaaaggggaattaggtgctggcatggaaaatgtgtccacaatgtattgtacagcagaaagaaaaaggaagtaatagaactatatgtagagtataatccaatttttttttttttttttgagatggagtctcgctctgtcgcccaggctggagtacagtggcacgatcttggctcactgcaagctccgccacccaggttcatgccattctcctccctcagcctcccaagtagctgggactacaggcgcccgccaccacgcctggctatttttttttgtatttttag

SEQ ID NO: 94636 - DNA, 131760 bp, Homo sapiens
  misc_feature (1)...(131760): n = A,T,C or G
tggtggtgtacgcctgtaatcccagctactcaggaggctgaggcaggagaatcgcttgaacccgggaggcggagggcgcagtgagccgaaatcacgccagtgcactccagcctgggtgatagagtgagactccgtctcagaaaaaaaaaaaaaaaaaaaaaaatgggcgtggtggtgtgtgcctatagtcccagctatttgggaggctgaggtgggaggattgcttgtggccaggagtttaagactagcataggcaacatggtgaaacctcgtctgtacaaaaaatacaaaaattagctggctgtggtggcgtgtaagtcccagctactcaggaggctgaagtgggaggtttgcttgaacctggaaggcagaggttacagtgggccaggattgtgccactatactgcagcctgggtgacagagtgagaccttatgtcaaaaaaagagaaaaaattaggagtaaaaattgagttaaaattagaaacttagtcgttaaaaatttttaaagttgtttagccaccattggtagctttgctatccattaggatacctgtactatgtttttgagaagtgttattttagataaacagtttctttgcattatagttgattgtctttgtttctctaatgtggctataacatcactgaggtcaggaaccatttaataaaattgaagtataatttacatatggtaaaagtttatgctttttttttgagacggagtttcgctcttgttgcccaagctggagtgcaatggtgtgatcttggcttactgcaacctccgcctcctgggttcaagcaattctcttgcctcagcctcccgagtagctgggattacaggtgcgcaccaccatgcccggctaattttgtattattggtagggatggggtttctccacgttggtcaggctggtcttgaactccggacctcaggtgatccacccgcctcagcctcccaaagtgttgggattacgggcgtgagccagcgtgctcatccaagtttatgctttttagtgtatggttgaattttttttcttagtccatttaatgttgccatctgtgtactttttgtttttttgagacagaatctcgctctgttgcccaggctggagtgtagtggtgtgatcttggctcattgcaacctccacctcccaggttcaagggattctccttcctcagcctcccgagtagctgtgattacaggaacatgcaaccatgcccagctaatttttgtatttttagtagagacgggggtttcaccatgttggccaggctgttctcgaactcctgacctcaggtgatccgcccgcctcggcctcccaaagtgctgggattacaggcatgagtcactgcacccagcccatctgtgtacttttgagagacacattccatcttgtaaccattatcacaaatcaagctgtagctacggttctttacttccccatttcctcatgcatctctctagtcagctccatctccgccttcagcccctgtcaggttctgttctagtctctgtccccaccattctccttgtccggaatgtcatgccagtgacccacgcagccctcggcctctgttacttggcatcttgcacctgagactcaactgtgttgtgggtgtgtcagtggtttgttccttggcgttgctgggttgtgtctgttgtatggctgtatcatggtttgatgtgtctgctcatcaggggaaggtcagttttaatattctgatacgtttcagtgggtccttttctgtatgtttaacttagtgattgtgttatgcaattggtaacctgcttttttcacttaatgtatctggaaattttggttttattacttattttccatctagaacttcaacattggaaatttctgattatgctttttaattttttttgttattctacagtgagtattgtttatgtacagttttttaggttggtaggttaatttccttcgggtagatttctagaagtagggttactaggccaaaggttttggggtcacatgggttcattccactttcctactgctgtatgcagtctactcctacagggcgttttttgggttctgaacccatttgaaatcttttctacaccttcccaaattgcttctgtaattccctttagcaggattagtggagtgccagttgtctgatttaatgtcttggctaagtggatctagggaaatatttattttagtctgtattcctctttttagtagcaaggttggtcattttcctctaagctggttaagtacatgcttttctccttttgtgaactgtctttttttgtcctttttttttttttttttttttaggagtctcactcctttgcccaggctggagtgcagtggcaagcccttggctcactgcaacctccacctcctgggttcaagcaattctcctgcctcagcctcccaagtagctgggattacaggcatgtgccaccacgcccggctaattttttgtatttaatagagacagggttttaccatattggtcaggctggtctcaaagtcctgacctcaggtgatccacccacctcagcctcccaaagtgctgggattacaggcatgagccactatgcccagcctctttttgtctttaattaatttttctactgggattttaatgtttttcttaccgatttgtatgagtgctttttatggtattggtaatagctttttgtcgtacctagttcaaatattctttccaagataatttggttttagattttgatgatttactttttgagttttaaacatttaaaaattatcttcaaatctttctattttttcagttacaactttattatttttaaggttaggaaattgaatttccttcagagatttagtaaatactcacttttgtgttcggttttttaatgttttggttttttttttttcctgtcacctaccagaaggaacgttttgatttttctttctttctttttttttttttacattaaatgtaaaacttggaaagttagcttataaaaatgctttatttatttatttatttatttatttgcttgtttgagacagttttggttttgttgcccaggctggagtgcaatggctcagtctcggctcactgcaacctccgcctctcaggttcaagcgattcttctgcctcagcctcccaagtagctgggattacagacgtgtgctaccacgcccagctaatttttgtatttttagtagaaatggggtttcaccatgttggttaggctggtgtcgaactcctgacctccagtgatccgcctatcttggcctcccaaagtgctgggattacaggcatgagccaccagaccccaccatgtaatttattttgatgtatggtttgtgatgagagtttaagttgaatttctcaatgcattaatttgtttttatgacataactttaaaattcctaacccttacctttcccctggttttctgaattactatatgtgagagagtttctttctagccctcattttctcttactgatctcctttgacactctgggaatgtattgtaaggaaataatcccgaatatactctacctatgttaatttagcttttgtgccagtttcacactaatctcctatcataatgtttgtttagtaagatcaggaacagaagcttgttttgaaagtaataagcattgttaactgcccccacctggagctcctgtcccctgcacccactctgatgggctctctgccgggtggtgggaggggcatgctcttgggtgtctctgtggccttgctcttcccttaagatctgtttgttgcagcctgcgtgctgtcttctgactccatcttcagaaactaaccatctgatcaaagcatgcctttctgctgctagtttaaatatgcactttttaaatgtttgttaggaatatgcttgtgcatttataaattctgtagtctttgatttcatatatacatgtatttcagccaggtacccaagacttagaagagccttatacgttttgtaacttctttttttggagatggaatcttgttcttcattgcagcatcgatttcctgggctcaggcggtctcctttggcctcctgagtagctgagactaaggctgctacattgccaccatggctggctaatttttgtatttttcttgtagagatggggtctcactatgttgcctaggctggtcttgtacacctgacctcaagtgatcctcctgtctcagcctccccaggtgctggcattacaggtgtgagccaccatgcctggccattttttatcttctgtagattcatggtttttaaaaatccgttgtccattttctcacagagataagcagtgatgtccttgcgatgaacaaggggtcttgtttgtcttggagtaagcaagaagaagctccctgatagctgtccagccagggttgaggtgaaggcacctcaagaagacaggggcacctgggtgtgtccagcaggactggagaagtctgaatggtggcacccaggtcaagctggcttctgtggcaggcctaagtgtgaactggaacattgcggagtggtgtggctcctcacccactggctcagtgctaaactgtgccaccaagagtccatctgcttcccttgaaaacttgaatgagatttttgctcctttatgacagaagttagctattaaatagattgaagcagcagctgcccccttgatgtgggacagtgtccaacctctcctcttggaacgctggcactgatttgggtgccaggtgccactcaccattgcgtttgcacccttgcttctcttaggggagaaagagcgaccacagtggggaacagacggggctgcagtggtggggctcactgcttatctttagtcctcctttcccctgtagatactggagtctgtagcccaggtctgaccctgtctcaccacaggattacccttgtctgctccatcctctgcttcatcctgtcctgaaacctgactttcctcagtggccccttctgctcctcccctgctgtttctcatccacttgtgctcagcagcgtttgggttacagctcctttgagattgtggtacagcctcccagagagtttgcaaagccagaaaggcaactcaccccagagtgagagccaggtcctggccatctccttctctctcccttgagaccttctcacagtttcttctcttcgtgtgttcttagggagaatgttgagatctgaggctgttccctaccttccactccaggacttggtgtcatgttttctcctagctcctggcacaggctggcagcctccccagggcaaggactgtcttacccgtgtctgtctctactctcctgcagtagccccgggcctgacacacaaatggggctctgtgtctttgaattggatttacaagaggagagtttgcagttgaggtagtcctggaggttgataagaactactggctggggagggctgggtatttgcttctggcgaggtggtgctgcacaccctcattcagcaagggtcacagaatgcctcctgggctctgggcagctgggagcagggagttgtccctccatagggagagacgggcggaagccggaaagtccacagcgtgaatgttggcttcagaccttgctcttctgcctgctggctgcgtggccttgaacagctcacagatactcctgtagctcagtctcctagtccttcaaatggggtgtgagtagtacctaccccacagggcggccatgaggatttgagggatggcctggtctctccaagcgcccacacaagttagctgttgaggtcagcgatgatcggtatgttcctccctcagtaggtggtttagattacccacccactcccgtgtggcccaccctgggcacagcagtgactgaggacacatttctccagctgtgccatattgaatgtgagtcagctctgtcgtttgaatcagatgcggtgggaatgtactttcaaagtgtcttttcagtgctgttaagtgtcaataaaacagttatgtgtgccttcaagtgacttgattttaattttaatttttaggagaacgacacattggatacagaagggaggtgatcatgcaccatggcactggcccccagaacgtccagcatcagctgcagaggtccagggcctgccctggcagcgagggtgaggagcagccggcccaccccaacccacccccgtcccccgcagctcccttcgctccctcagcaagcccgtcggcaccccagtctcccagttatcaaatacagcagctgatgaataggagccctgcaaccgggcagaacgtgaacatcaccctgcagagcgtgggccctgtcgtcgggggaaaccagcagatcacactggccccactgccgctccccagccccacctctccaggcttccagttcagcgctcagcctcggcggtttgagcatgggtctccatcatacattcaggtcacgtcccccttgtcccagcaggtccagacccagagtcccacgcagcccagtccggggccggggcaggccttgcagaatgtgcgtgcaggtgcccctggccctgggctgggcctctgcagcagcagccctacagggggcttcrtggatgccagcgtgctggtgaggcagatcagcttgagcccctccagtggtggacactttgtgtttcaggatgggtcagggctcacccagatcgcccagggagcccaggttcagctccagcacccgggtacgcccatcacagtccgagagcggagaccctcccagccccacacacagtcagggggcaccatccaccacctgggaccccagagccctgcagccgcgggtggggccggcctgcagcccctggccagcccaagccacatcaccacggctaacttgccaccgcagatcagcagcatcatccagggccagctggttcagcagcagcaggtgctgcaggggccgccgctgccccggcccctgggcttcgagaggacacccggcgtgctgctccccggggctgggggcgcagcggggtttgggatgacgtccccacccccgcccaccagcccttccaggactgccgtgcccccaggcctttccagcctcccactcacgtctgtggggaacacgggaatgaagaaggttcccaagaagttagaggagattcccccagcctctccggagatggcacagatgaggaagcagtgcctggactatcattaccaggagatgcaggctctgaaggaggtcttcaaggagtatttgattgaactgtttttcttgcaacactttcaagggaacatgatggatttcttagctttcaagaagaaacattatgccccattacaagcatatcttaggcagaatgatttggacrttgaagaagargaggaggaggaggaagaggaggaagaaaaatctgaggttatcaatgacgaggtaagaaacaggagttaatttgtttagtacaaatcttctagatgatcagagtctatgcracaatgaattaagtaataatttattgagcctgcggtatttctaaggtatttctaaggtgttggggcaaggatttgacccataagtaaaagtgaagaatgtgtttggcctccttcatgggaaggaagagctgttgagcgcagaagtgtgtcaggaggaagggacggagctgcgctrtgatgagtgcgtcttcaacacccagtgttttcattgagcaccaaggattcatctcaggttcagagaactcagcaagcgtgtccagtttttttccccttgtatctgggtgtgtggtttgttggctgacgctgacagctgtcaccagccaaacgtgtgaaagcccagcaccctttgtctggttttccaagtttcacattttactcgtatagatctccttaaaaacaccatcagcatggttttcaaacagatttaagtcactagctttttataataaccagccataagtcactagatgtatgtatatgggaccttcatcattaaaatagttattatggcaaaaaactgtttgagaagttattcaatttttagatgtagtctcaagatttgagatcatactttaaactcatttttacaaatacctattaagtgatatttaagagtgactcttttttagagagtatactttttgggtgcctggaatggcacataataaaccccctacctgagatttcttagtaccatggtgagtctgagacttcctgaaaaccagggtgagagtgaattggactgtgacacactgtattttgtgcctttgtgttgtgtagtgtatactatgttggtggagcttattttgttttatgatacagttaaaataatttaaatctttgtcagctcttctgcaaagaaatctgcttttgctgaacaaaagctagtctctttgctcaagcagtccttactggtatctatggatgtatttgtgtggctttgccattttgtgttttcttttaacaccttttccaggatggaccatatttgtttttcaacaggtttatatgattattttgaggatttcacctctattgtcctgaaatagtaaaattcatttctgttacgtttgtataccaatgttgtctgtaagctcaatcccccttacctgtgcttagaaagaaaaacaaattcgtttttccaacttcctgctgaaaaagacctttgccattctgaccctacatataacagagtggctattctgcaaatttcctagggagttggtagggctttgttacttgaagtctgtctgccatatgcatttttaaagtttgaagttgcagaatctaaagatattgcactttgacttaaattggagtttctgcaaggtttgcagtttgagttaggttgttgtgctataaatctgtcagttcagtatcctttcacaggaattgatgcaaaaacattccatttttaaaccccaaatgtcagtgagctatcagcaataaaattctaacaaaattttgagcagttgtaaaaattatgttgcctttttttctcaaaatatttcctctcaggtaaaggttgtgacaggaaaggatgggcagactgggactcccgttgctatagcaacccagcttccgccaaaggtttctgctgctttttcatcccagcagcaaccatttcaggtacttttcgatggttctcaaatgtagtctcatcccaaacttttccttcatccagatattttaaccttcgatatactacttgctcttcagcattttttttccagagcccatttcttatttttcaacagtaaaaaatcttcctgcgtatacaattataaaattaaattgcatgagttaatgatgacacagatcttagtgcattactttctttcgtatacttgtaatgcggtagtagctttagcatgcatgtcatctaatagtcctgttgaatgtatgctcaggattccttgtgtgctgtgttttcaatgttggttctttcttgtgtcctttattttgagaacagtgcaaaacagaataagaaaaaaaagattcaagtagatgataaattggtattttccatagctagaggaaatgctgaagtgaaatacacttctgaaatcatcaggaccacaggcttctaaacggatattaagtgaatgcaaactgattatttttaattttttgcaaattcactcagtgttaaattagtaatgccaataatttaaaaacacaggtcactcacgcctgtaatcccagcactttgggagactgaggtgcatggatcacctgaggtcaggaattcgagaccagcctagccaacagggtgaaacgctgtccctactaaaactatgaaaattagctgggcatggtggtgcatgcctataatcccggctactcaggaggctgaggcaggagaattgcttgaacctgggaggcggaggttgcagtgagccgagattgtgtcactgcactccagcctgggcagtagagcaggactccgtctcaaaaacaaacaaacaaacaaacaaaaaccaaacaaaccatcaaatttctactagctttggaatagatagtgttgggttgtgaaagcagtttcatccttgggatttttgttgttactttaaattttgatttaatttcaaatgtacataatagttgcaattaattattttaaaaaccccttatatcctttaccaaatttatcagttgtttttgccccatttgcattattttcattctcatatatatacacatatctaaaacatcatatcctattcttttatctgtaaatacttcagcatgtattagataagaatgtttccttacctaatcacagtacagtgataaatatcaggaaattgtacagtagtacaataatacattctaatccatagtttatattcaaatttcatctcttgtctcaaggatgtccttcatagtgtttctttccccctagtccagtatcaagttgtcatgcctctctggcctttttaatctgggttggtttcttagtctttcatgaccttggctttggcctgggcctgggcgttaaaaagtacagaccaattattttgtacagtgtcctttgatgtgggattgtctgatgttttcttgtgtcctctttggatcatgtatttttgagaagattgctatagaagtaatgatatgtccgtttcaatgtgtcttatcagaagggtgtgatgtcactttgtcctataactagtaatgttaactctgaccacttcgttaaggtggtttctaccaggcctgtccagtggaaatttatttatttttccttttttaaatgatgagtaatttgggggaagatactttgagactatgtaaatatcctgaatctccttaaacttttacccactagttctagcatctgttggtgagtcttgcctgaatcagttattactataaagaatccatgctgggttttctaactccatcattctgtctacatttattagaatcagtaggctgtaatatatcactatcagtatttatttgcttatgtttgtttaaacttatttaatgtacattcagtaaaatgcactgttttttagtctgtacttgtgaattttgacgaatccattgagttgtgtaaccaccaccacagtcaagcaacagaagctccatcacctcccaaaatgttccctcatcaacccttcacgcctcccttgacctttgttctccatcgctaatgattttgccttttccagaatgaatatctatggaatcctagtctgggttgcttttcagtctggcttctttcacttaagataatgcatttcagattcatctactttgttttatttaccattaatttgttctttttattgctgagtgctattccattgtgtgaatgtgccccagtttgtttatccatttaccctttaaagaatatttgggttgtttccagttttcagaatttgggaataaagctgctacaaatgttcacatacagtttttcatgtcaacataggtattcatttcatttggataaatgcctaggagtcaaagagtctctctgaaagtattctggtttgggtggctggctggctgatttcaaaaaaaaaaaaaaagaaaaactaggaatcagatttctgggtatgttgaactttattaagaacccgtccggccgggtgcagtggcacacacctgtaatcccagsactttgggatgctgaggcgggaggattgcttgaggccagaaatttaagaccaacctgggccaggcactgtggttcacgcctgaaatcccagcactttgggaggccaaggtggaggatcacttgaggctgggaatttaagaccagcctggactaggcatgatggctcatgcctgtagtcccagcactttgggaggcctacatgggtggattacctgaggtcagtagagaccagcttggccaacgtggtgaaaccctgtctctgctaaaattgcaaaaatcagctgggcatggtggcacacgcctgtaattccagcttctcaggaggcacgagaattgcttgaacccaggaggcggaggttgcaatgagctgagacagcgccactgcacaccagcctgggccacagagtgataccctacctcaaaaaaaaaaaaaaaaaaaaaaaaagaccaccctgtctctactaaaaattaaaaaattaggccgggcgtggtagctcatgcctgtaatcccagcactttcggaggctgaggcaggcagatcacctgaggtcaggagtttgagaccagcctggccaacatggtgaaactccatctctactaaaaataccacaattagccgggcatggtggcgggcacctgtaatcccagctacttgggaggctgaggcaggagaatcacttgaacttgggaggtggaggttacagtgagccgagttcaccccattgcactccagcctgggtgacaagagtgagacttgtctcaaaaaaaaaaaaaaaaaaaaaacctatgtgtagygatacacacctgtagtagtcccagctacttggaggctgaggtggaaggattgcttgagtcctggagttcgagggtgcagtgagtcgtggacatgccagtgcactccatcctgggccacagggccacatagtgagaccctgtctcaaaaaaataaaaaggtggctaggtgcggtggctcatgcctgtaattccagcactttgggaggccgaagkggggcggatcacytgaggtcaggagttcgagaccagcctggccaacgtagtgaaaccccgtctctactaaaaatgcaaaaatcagctgggcgtggtagtgggcgcctgtaatcccaactactcgggaggctgaggtaggagaattgcttgaacccaggagatggaggttgcagtgagctgagatcatgccactgcactccagcctgggtgacagagcaagactctgactcaaaaaaataaataaataaataaaaaggctgggcacagtggctcatgcctgtaatcccagcactttgggaggccgaggctggcagatcagttgaggccaggagttcgagaccagcctgaccaacatagtgaaaccccatctctacttaaaaaaaaaaaaaattagccaggcgtagtggcgtgccgctgtagtcccagctacttgggagtctgaggcaggaaaatctcttgaacctgggaggcggaggttgcagtgagccaagatggcaccactgcactctagcctgggcgacagagtgagactctgtctcaaaaagaaaaaaaaaaaaagattcaaagaaacttccaaactttctcaaagtgcctgtaccattttgtgttcccagtagcaatgtatgatagttctcttcgttttgcttcttctctagtacttgttattgtcagttttcttttttaatcattccaggtctagtttattttaatttggatgtctctgaagactaataaagttgagcattttttcatttgctgttcgtatatctttgacaaagtatctgttcatgtctcacccattttttcagagttattactgcatttgaaaattcttcacataatatggacatgttttttgtcagctacatgttttgcaagtattttttcctgtctttggcttgtttttttcttctcttaagactatctttttcagaacaaaagttttaaattttgtggaagtacaatttatcgtttttttcttttatggatttgcttttgatgccatatctaagagctctgctcaatccagggtcagaaagatgttcttctgtgttgtctcgtagaagttttatagttttacttttagatctatgatttattttgcgtaaaattttgtgtaacatggcaaatataagaaatttgcatgtgaatgttcagttgttccatgccatttcttgaacagacgatctatgtatgttgagttgacttgcacctttgccaaagatgagttgatacttttatggttctgtttctggattctcttctcttcccgtctctttatgtgtttttctctgccagtgtcacactattgtgattactatagctttatgtaagttttgaagtcaagtagtgtgagttctccaagtttgttctcctttttcaaaattattttggtcattctggttcctttccctttttgtatacattttagaatgagcttgttgatatctacaaaacatcttgctgggattttgattagaattgtgttgcgtccattgacctgtttagggaggagtgatatcttaacaatatgagtcttccagtccatgaatatggtgtatctctccatttatttcagtattctttgatttctttcatcaacattttgtaactttcagcataccatatattttcttaggtttatacctcagtattccaattttggggggtattataagtagtacttaaaaaaatttccagctgtttattgtaagtatataggtatacagttgattatttgaacctacattctgcaaccttgctaaactcatttattagttttaggagcttttttgtagattccatgggattctctacatagagaatcatgtctgcaaatagagcaggattttttttctttttcaatctgtatgctttttatttctttacttttcttttttttttttatcgtattggcaagggcacccagtatgatctccttcctgatctagggggaaggcagttagtcttccacctttaagtaagatgttaactgtagattttgcagatgttctttatcaaggtaataaaattcccttttactcctagtatatcatgaattgatgttgaattttgtcaaatacatctattgacagtgatatgtggtttttcttctttagtctgtaaaaatggtaaattatattaaattgaggcatactttaaaaacagaacacacagatcttcagtgttaacagtttgcagagttttgacaagtacatacacccatgtaacccatacaatggtcaacatgtccatttctatcactccatgaagttgcctgatgctccttgccagtcatttactgcccagcccccctcctggtggttctgttattatttattttgatgctcaggttatctgtgattggccaattggagcctcttcaagctggctgtagtatacttccgacatacctctcttacttccggaggacttccttcttttctggcacaaactgttgaaagtgcaccttgtatatatatatatattctttgatccagccccggaatcagccatttcgacaaagagcctggttcctttcggtggggaatagtaatttgattctgctatttagatactcattgtaatgggttttatacaattgaagataactcttggtcgggcacggtggctcacgcctgtaatcccagcactttgggaggcagaggcgggcagatcacctgaagtcaggagtaagagaccatcctggccaacatggtgaaacagtgtactaaaaaacacaaaaaaatgagctgggtgtggtgatgtgcgtctgtagtcccaactactcaggaagctgaggcacaagaattgcttgaactcgggaggcagaggttgcagtgagccaagatggtgccactgcactcccttgggtgacagagcaaaactctgtctccaccgcctccgccccgccaagaaaaagaagataactcttaagttggagattatcagaaaatttgttagtgggacatctttactgctaatgcctggaggaatagaatatattaatgcatttatagaccacactgataagtatctgcattagaacagtaggacaataggccaggagtgcctatcaacacgaaaaagagatgcagtgtttacagtacaaattaaactgctcagaattcctgttccatgcaccagattgccagaagttaaactggagagaatccgttgatgtagagctgtaggattctcatctgcttttgatgagagtggagcttggtctagttatttggaaacgttttgcatcatctggaaaaggtgagcagagagcatactctgacccagcacgatgctctagagagactcttgtgtttgtgcaccaggacacatgtgcagtaatgttcctcgcagcattgtttttggcagccccaaattggaaagaaccagattgtccattggccacagaatggatgggctgtgtcctagaggagtactaatagagcacccagtgcaaagcagagagccctgccatcgtgcacattgatgcgcaggtgtaagcaaagctgagagggtttagacacacacccacaggtggtgacactgtgaggaaacttttttttcttttggtttttgctttattgagatataattggcaaataaaattttataaagtgtacaaagcgatttggtataaggatagtgaggtgattaccgcaatcaaattaattaacagttacccttgttttgttttgtttggtgagaatggctaagatctactctttcagcaagttccaagtatacagtgcaatattattaattacaggctgggcgctttggctcacacctgcagtcccagcacttggagaggccgaggctgtagggtcacttgagaccgcgtattcaagaccagcctgcacaacataggacagcatctctacaaaaaaattaaaaaattagccaggtgtggcatgtgttctgtagtcccagctattcattcagaaggctgaggcgggaagatcgcttgagcccaggaggttgaggctgcagtgagctgtgattgtgccactacactccaggctgggctgtagagcaataccctgtctcttaaaaaaaaaagattccacgtgtaagtgatactgtacagcatttatctttctctggcttatttcagttagcattatgccctctaggttcattcatgttgttgtaaatggcaggatttccttgctttttgttaccaaatagtattccatgtgtatatactatattatctgttcatctgttgctgggcacttaggttgttttcatagcttggctgttgtgaacagtgctgcagtgaacacaggagtgcagatacctcttcaagacacggatttcctttcctttggctgtgcacccagaagtggggttgctggatcatatgttcattctatttttaattttttgaggaaccttcatactgatttccataatggctgtaatagtttacattctcaccaacagtgcacaagggttctttagggaaatgtttaacagacattttgggtagtaagtgtagaagcgggtgtatggagtttttaaggtatgggtaaaattttttttttttttgtcttccagtataatctcaagagccaaaatgtttatttcttaaggcatgtgatgagtatgtagggatcgctttattattactgctttaaattgtatgtatgtatttttccactttcctcctccacatcgtattatgaaaattccaaacaagttgaatggattgtttagtgaaagatatcttactgtttaaattctatgattaattttactgtgctttggaagtcttacatatattttataatttcttttgtatgtgtgatgtatttcctaattaaaaattccttgtaagacggaaagaggaaaaccaaggagcctccattttgagttacagacttgcggcaggtgacagtggatgtctaagaaaatagaaaagagttaaaatggaaacatccattgctttaggaaaaaattcagcgtgagttttattactttctttttctttttctttttctttttttttttttaaacagagtctcgctctgtcgcccaggctggagtgcagtggcgcgatctcggttcaccgcaagctccgcctcctgggttcacgccattctcctgcctcagcctccggagtagytgagactacaggcccctgcgaccacgcccggcgaattttttgttatttttagtagagacggggcttcaccatgttagccaggatggtctcgatctcctgacctcgtgatccgccctcctcggcctcccaaagtgctgggattacaggcgtgagccaccgcacctggccgagttttattactaatagccaattgtgtaatttttattttgaccagtgaaactctagaaataaattcagaatttgttattacatatgtactaatttctgtttcgaaaagatttttaggtgatactgagtgcaggggtgttgcatataaaatacagacaggcacgcatttatttataaaaagataaaaagaaccgttctaagcagaaatttttcatcattttcctgttagagaaaatgaataattcgccataattttatcaccctaacacaaccttttttttttttttttttttttttgggacggagtctcgctctgttgtccaggctggagtgcagtggcgcgatctcgactcactacagcctctgcctcccaggctcaaacgattctcctgtctcagcttcctgaatagctaagattacaggcgtgtaccaccacacccagctaatttttgtatttttagtagaggcgggattttaccatgtcggccaggctggtctcgaactcctgacctcaagtgatccacctgccttggcctcccaaagtgctgggattacaggcatgagccaccatgcctgactgattttttaaatgttatgttgcatatataccagttgaaacaaatgaatttatacttttttgttttgttatttcatttaacaaataattattttattgacttctaataattctgtttttaactgctgttactgcttcattattttcaggacctgtaattcatctaaccactttctagttttaggttatgtctgttctatttagaaaaactcttaggagtgacactagtgaatcaggagagcgtaagtctcttcgtggtgcccaccgtatactcactttgtgtttagctaaaagtgctgctagactgtggccccagttttattatggctttgcaagccctgttaaccattctaaaaagagtttaaactttgggaggctacggtgggcagatcacttgaggccaggagtttgagaccagcctggccaacatggcaaaaccccatctctaccaaaaataccaaaaatttgccgggtgtggtggcgtgttcccgtactcccagctacttgagaggctgaggcaggagaatcacttgaacccaggaggcagaggctacagtgagccaagattgtgccgctgcactccagcctgggcagcggagcaagactctgtctcaaaaaaaataagacagagtttcaggatgagttttattatttgcagccaattgtaggatttttataataaactaatctatgccagttaaactccagaaataaatccagagtgctcagcattgcgtgtatttctctttgtttccagaaggttttgtggttgtgttgagtgcagctatagtataaaaaatactactaatattattatggttatttatgtcttataaaaacctcctgattggagcatttttttcagtgattatgatgttagagaaaatgagtaattatttatggttttgtgatcctaacccaactgttgtttcttacgttactttacgtatgtgtttgtattttttttttttttttttgagacagagtcttgctccgttgccaggctgaacacgatctcagctcaccacaacctctgcctcctgggttgaagcgattctcccacctcagcctcccgagtagctgggactacaggcgtgtgccaccatgcccagctaatttttgtatttttagtagagatggggtttcaccacgttggccagcatggtctcgaactcctgacctcaggtaatccgcctacctcagcctcccaaagtgctgggattacaggcgtgagccaccgcgcctggccagttttttaatttttttgtagaaatggaggtctcactttgttgcctgggctggtcttgaactcttgggctcaagcagtcctcccgcctcggcctcccaaaatgctggaattacaggcatgagccactacacctggcttcatagtttatttctttgtttatttaaatagggcagaaattttccttttggtagctgccaactactattggtcttaatttctaccttcagaataccatcaatctgtccttttaggtggcagatgttctgtgagctttcttctgctgtgttttccatggataagctctgttttggtattgtctctcctaaatgggcacccagaattaaattcccttcagagtgttttttctttgtgagaaattctcttttttaaagaattgtcataatggtttttgatcaaaatcaaggttgcattttaaagacaagagtatcttctgtaatcccagcactttgggaggccgaggcgggcggatcacgaggtcaggaattcaagaccagcctggtcaacatagtgaaaccccatctgtacttaaaaatacaaaaaattagccgggcttggtggcaggcgcctgtaattccagctactcgggaggctgagtcaggagaattgcttgaacccgggaggcagaggttgcattgagcagggcttgtgccactgtactccatcctgggcgacagagagactccatctcaaaaaaaaaaaaaaaaaaaaaagaccagagtatctttaccaataataccttcatggagacagaataaggtaaaactaaaaataattctgaaaaccaaggctgagtgtgccgtgcctggaggagttcctgtgtcttctgcagaacccaggggcagcaggacccgtgtgtcctgagtcctctgggaagcaggctgagtgtcagccacagccggggagcagtcaacagggcgcacagtcctccctgtcagtgcttcttgagcagaagtttctcattttaatgaagtccagtttatccgtgtgttcatgtagatatccagttttctagcaccgtttgttgaaaagactgtctgttccccattggattgccttagaggctttggaacactgtgtgagcgtgggtctgattcttggtgcgcagctcagttcttcttatctgtgtgttggtccttacgccagcgctgcactgcactgtcctggttcctggagtcttggggcgtgtcttgaagtcaggtccttcacttggttcttctctctcaataatcttttttcaggctcactgatttttaaatttttttttctttttctttttttgagatagggtctcactctgtcacccaggctggagtgtggtggcgttctttcggctcactgcaacctcagcctccagggctgaagtgatcctcccatcccagcttcccaagtagctgggagtacaggcctgtgccaccatacctagctaatttttgtatttttgtagagatgaattttcgccacgttggtcaggctggtcttgaactcctgacctcaagtgatctgtgtaccttaggttcccaaatggctggaaatacagcataagccactgcgcctggtcaatttaaaattttttgtttgttttttggagatggggtctcattatattgcccaggctgattttgaactcctgacctcaagcagtcctcttgccttgacctcccaaagtgctgggattataggcatgagtcaccatgccccgactgattttttcacatctccacactgatgttacgcctatccaatgaatttttttttatttcggatgttgtatttttcacttctagtatctccatttcgctctttattttaatagtttctgttttgtcaagatttcttcttgtcttttattgtagtatatttttctttatgaccttgggcatacatattaaggtcactttaatatccttgcctgcttattctagtacgtgggtcatcttgaggttggtgtctgagtatggctcgtgttttttgtttgtattttggagtaattttgtttgtattttggagtaagtttgaattggattttgtacaattgtgcatgatatgtagaaaccctgggttctgttatattcttctgaaacgtatttattttctttaacacttaacttgattgaattaaaaatgcacactctggctgggtgtggtggctcacgcctgtaatgccagcactttgggaggctgaggcgggtggatcacaaggtcaggagtttgagaccagcctggccaatatggtgaaaccctgtctctactaaaaatacaaaaattagccgggcatggtggcgcacctgtagtcccagcttctcaggaggctgaggcaggagaatcgcttgaacccaggaggtggaggttgcagtgaggcgagatcgtaccattgcactccagcctgggcgacagagcgagactctgtctcaaaaaaacaaaaaacaaaaacgccaaacagcaacaaaaaacctgcatactctttctcctttgtggcaggaggcacctgaaaactcagttcagtacttgggccttctcttggattctgtttttgtgtacatggtttaggtggaggttagggagagaatgtggggcctcctccttttccatctgtctcttgctctttgtcctcttgttcaagccagtgagatgctatgtgtctttaggtttgagccgttccatagagcacagactggggctgccctcatgccaaatgccatgaaactggaaaccttaccgtgttctattcccttcttgcgaatatcacttcccttcctgtatcactggcctaccttttcatatttttttgtatttcatctagagtttatggttacctggattatgttttttgtttttgtttttgtttttgtttttttgagacggagtctcgctctttcacccaggttggagtgcagtagtgcagtctcggctcactgcaagctctgcctcccgggttcacgccattttcctgcttcagcctcccggagtagctgggactacaggcacccgtcaccgcgtctgactaatttttttttttttttgtatttttagtagagacggagtttcaccatggtctcgatctcctgcccttgtgatccacccacctcggcctcccaaagtgctgggattacaggcgtgagccaccatgcccggccttgttacctggattatgtttgaccggataggaagtacttggccattactggacacggagccctttatcaagttttttttttttttaattaaaaaatactcttttctttggttgtattggtcatacatgttcattatagaacatttgggaaatttagaaacgcacacacacacaaatcatgtcacctgtaatgctgccccagaggtaaccactgccaggccattgttttcaaaacattctttcctttctttcctccctctctttgtccattccctctgtccctttcatcttctttccttttccatcttggttaaatgtaaacggcagtgccttcctgctacatatgctgtattgtggctgatttttccttttagtaactcttcctaagcctttccccgtgtgagtacagagtctgtggcatggctggtggtggctgtgtggtggcccttgtgtggcagttggttcaaacagctccctgtcactgaacagttgctttgtttaggtatctgtaacttttgcgtttaaaatgtctcactaagtagagtgaatataattgagtgatttaaggaataatttagcaactagtaattaagtccttagcatttactttaatggcaaggatggtgaccagatggaaaagggttagggttaagtctgtgctaaccaagagttggctagtttctgtctttgtaaaataacatgccaatagcttcccatgtaaacttttaaaaaacatgattttttacgagcagttttaggttcacagcagaattgagaggaaggaacaagagatttttaaacataccccattgctcccccgcccatgtgcacagcctcctttgtatccgtgtcccccaccagacggtgcatttgttgcacttggtgaaaccttcagtgccatgtcattagcatagtactgtagtttcaccgccctagaaatgtcccgtgctcacctattcacctcctcccctctgctttgcacctggcaaccactcatctttttgtctctatagttttgccttttccaagacatcacagagttaggatcatgtagcatgtcgccttttcagattggcttctttcattttttgttttttttaaagatggggtctcttactttgttgcccaggctggaatgcagagtgcagtggcacagtcctagatcactgcagcttcaaactcttgggctcaagactcctgagtagctaggactacaggcatgtgtcaccatgcctggctaacattttaatttttatttttttgtagagacaggatcttgctgtgttgcccaggctggttttgaactgctgacctcaagcgatcctcccacctcagccttccaaagtgttgggattaaggcataagccaccacacctggtgatggctttttttcactttaaacattttaaataacatctgtctatttatatctctatatatctcacatatttatatctcatgtagggtgctaactataaaaatatccttttaaagctctaagttggctgggtgcggtggctcacacctgtaatcccagcactttgggaggccgaggcaggcggatcatgaggtcaggagatcaagaccatcctggctaatgcggtgaaaccccgtctctactaaaaattcaaaaaaactagccaggcgtggtggcaggcgcctgtagtcccagctactcgggaggctgaggcaggagaatggcttgaacctgggaggcagaggttgcactgagatcccgccactacactccagcctgggtgacagagcgagactccgtctcaaaaaaaaaaaaaaaagatctaaattaattagatagttattaattggggttttagtgtcattttccagtagaaaggcaatttcacctttttattattcggtgtttttggatgtgaagttatgctgggcagtgtgactgatgagtcggctgagatttgtctcagaactgaaactcatgtttcccagcattagcccttttgttgtttcccaaggactgtaggtttgcattgatttgaaattccattaaaaccagaataatatgtcttttacaagtcttttttcccccagaggtaagttagaactttaaattgtttattatacataaatatacattacacatgtatatttaaagacacggggtagataacattcctgttattagaaaggaaggaggtcgatgtttgggataattatgataatttgagtttattcttgtaatggccttcagtgatcaaaatctcattttttcatcttttttcccagcagcaagccctcgcagggagcctggtagcaggggccggaagcacagtagagacggacctgtttaagaggcagcaggcgatgccctccacaggtatggcaggtacgtcrgcayggctagcgtggcctcgggaatgcccccctctccttgggctgccgaggtacagttgccatgagtttctgaagagcagttgctaaacttggtttcttcctactttgaaaattaacctgtcttacagtgattatcagctgaacaatatttacgtgaatttttctgtgtcctgaagtgaggaatttttcagttgagcaggtgtattccgtgttggttttctgtatgcatttgtaggctcttgagtcatcacggtgtgattaaacacaaaatcatctgctttccaaagttgtcatatttttaagctgattttttcaaatgataaacttaatacatttttatataaaagacttcaacagttcagtagggtataacttaagtctatgtctggcttggtacctgcccactccccagccacagcagtaaccactgttaatgtttcccatattctctctcacagaccttcctctcttcatacacaagcattgttacatatgtgatactttgaaaaagttgagatgcgatcatatataagttgttatgtctaagaatattaactgaagaggccatctctccaggtcataacctctctcagtgctccatgctgttccgtcttggggatggttggttctttatcagtcagatccttgtcagtgttcatctgttagtgccaccttgtgtctgttacagtgagctaaggattgaacatgtagtctcatggtttttttttcctacatgtttatcagtctatccatctgcttattttttgaggtagggtctggttcacccgggctggagtgcactggcatcatcatggctcactgcagcctctacctcccaggcttgagcaaatctcatgcctcagcctcctgagtagctgggactacaggcgcgtgccaccactcccagctaaatgcaaaaattgttgcattttaggtacagttgtggtcccactatgttgcccaggctggtctcaaactcctgggctcaagtcttcttgcctcagcctcccaaagtgctgggattataagcgtgagccaccgcgcccaactgtctgtcaatatatctaaaggaaaaacgcctagaaatgaaattgctagatcaaagcgcagatgtagttaagtaataatggtgctcaattgcccaccaaaaggacagggccagttttcactgccatcaacaatttctggttctttcacattttgatcgttttattaggtataagtcatttaatcctcattgatctgatgggtgaaacattccttgttctgatatgggtttctttagttttgagcacgctgtgcagcctcattccctgtgtgctgggcatttgtgagtctgctccactgcccgctctccatgctctcgtccgtgtacttgtgatgctcctcatgtgtgcctgtgctttctgagtgctaagcaagcccacctctgcccgtcacacacgttgcagtgttgcctctcaggttgttgcttgtccttggccttttcatgatgctttttcttatatyggcaacattttaatgagaaattgtatttatcagccttatgttttatggcttctggattttagttcatgtatagaaaggcctcccttttccaagatgataaaaacacacatgtttttttctactacttctctggttttatttttacatcaaactgcaccttttttgaaaattattctagagcagtctaagaggcctcgycttgaagtgggtcaccaaggggtagttttccagcacccaggggcggacgcaggcgttcctctccagcaactaatgccgaccgcacaaggtaaggcccagcagcagagccagctccccgctcaggagcaggcagcacactgcggttccagaaaccagcaccagactcagacttgggcagtggaggtagcgtgtttgcagtggggtgcctgaaattgagatacttctctgagtcccagtcgatatcatatgcaaagcccctggagacatattcttgccacactaatgggagccacacgtcgcattgtcatagtgtctttcaacaatttttactcctatgtttttcctaattgctgctgttgtaggggtgccctgtggtgatctggtgcttgttttgcttgatgctgacttgcaaaggtcaagcgcctctctttccttttgtgtgtgctcggttgtggccaacttctcgtgtgagtgtggtgggtcttggacaagcactggggtgttagacgtgtctccttgtgactcattggtagaagctgccacacttgggaatcagtgcttttggcacttttcttattttgcaggaggaatgccccccacgccgcaggccgcgcagctcgctggacagaggcagagtcagcagcagtatgacccctccacggggcctcccgtgcagaacgctgccagcttgcacaccccactgccgcagctgcccgggaggctgcccccagccggtgttcccactgcagccctctcctctgcgctgcagtttgcacagcagccgcaagtggtagaggcccagacacagctccaaatcccggtgaagactcagcagcccaatgttcccatccctgcaccgcccagcagccaactccccatccctccctcgcagcctgcacagctggccctccacgttcccacacctggaaaggtgcaggtgcaggcctctcagctttcctccctgccacaggtatgagaaaagatagaggaaaaaaagaaaatggtttgcaggatttgctggctacctgtgtgttagacagagtgtcacaccacactgtaatttgtgtattttctcttagcagcttgctcccccaatttagaacaattactcaattcagtacttgcaatacagttttatttggctctatgatattatctttattaaagtaatagagaactgggctgggtttggtgactcacgcctgtaatcccagcctttgggaggctgaggcgggtggattacctgagctcaggagttcgagaccaacctggccaacatggcgaaaccctgtctctactaaaaatacaaaaattagccaggcgtggtggcaagtgcctgtagtccaagctacttcaaaggcttaggcaggagaatcacttgaacctgggaggtgaaggttgcactgagctgagatcacaccattgcactccagcctgggtgacagagtgagactctgtctcaaaaaaaaaaaaaaaataataataataatagacaactgttattattgtcactcttagtaccaggggtccctccttactcacccatatgttgtgtgaagggcatggtgtcagttatcccttatgatctgcctagcaaccctcaggtaggtggcagcgacccattctaccagtgtggagacacatactcagaggttctggggctggccccaggttacatggcgatgaagtgatgagcggggcttgaccctagctccatgtgagtgcaaaaccatgttggacaccacccaccagacgtgctccctggacgcctgctttgctgcttttgggatgctatatgctctgcaaatgtgtgtaaggtgttactgatccagcttgatacacatgtgtaaggcgttactgatgcagcttgatacacatttcaggtagttaaaatgcccctcctcctccactgattaattttacccagtgtgtttttgggatgtccacagtaaactggtttcggttcctaaggaatatcgaaatgccacagcctcggtgccagccgtcaacagggcactgacagggaggccggggaggactctcagcccccttggttctccactgtttgatgcacatcagggcgtggggagcccactgcagagagtcttcccttccttttgccttctccctcactaacaaaggaatttcctaggtgggctttaagttcagggtttttgtttgtttgttttgaaacagggtctggctctgtcacccaggctggaatgcagtgacacgatctctgctcactgcagcctctacttcctgggcttagatgatcctcctgtccctgccccctgagtagctgggactacaggcgcacaccactacacctggctgatttttgtattgttgtagagatgggatttcgccatgctgcccaagctacaagtgctttttctttttttttttttagacggagtttcgctcttgttacccaggctggagtgcagtggcccgatctcggctcaccacaacctctgcctcctgggttcaagcgattctcctgcctcagctcccgagtagctgggattataggcatgttgccaccatgccggctaattttgtgtttttagtaaagacgaggtttctccatgggttaggctggtcttgaactcctgacctcaggtgatccgctggctttggccttccaaagtgctgggattacaggcgtgagtcaccgcacccggcctacaggttctttatgtttgagatttatggcaaagtcttaagtatataacgatgaaataatagtaacaataatagctatctcttattcaccacttgtgaggtgtggtgtcaagcactgtgatgagcgatttattggcattgtttatttcctttacctgacaaccttatgaggtagaatctttactatctccattttatagattaaaaaaaccagaggccagaaaagccagcaactgggggggctgtagttgggagccttttgtgcaagtctgcagggaagccttgtacacccactttgagaaaggcgacacatgccagggcagctgagctcttctaggccttacattgcttgctttaggtttttgtggaaatgattctattttgaacacttcctcacatcgagccacatactgacttaaagcagctccgtggtttttcttagatttaatttacctgcctgtgttactgaaaaactcagctgtggaaaatggttttattttattttatcttttttttttttgagtcagagtctcactctgtccctcagggtggagcgcagtggcacgatctccgctcactgcaacctctgcctcctgggttcaaaccattctcctgcctcagcctcccgagtagctgggactacaggcatgcgccaccacgccctactaggttttttttttttccagcagagaaatgatttatttcacaatttagctctctaaataactttatattctctccttaagaacaacagtagaggaaatcatttactgatcattttacaatgcacataatatcttatgcatgcttaggcaactgtttttttttttttactttttagtagagatgggcttttgccatgttggccaggctggtctgaaactcctaacctcaactaatccacccmccttgggctcccaaaatgctgggattacaggcgtgagccgccacacccagcctggaaaatgattttaaagaagcgctttacaaagtctgtaggaacctgttacttctaggttagccagggttggcacactttctcagtcaagggccagggagtaaatgttccagctttgcgagctgttcagtttctgtggcagaagtgaagacacagccgctcacggacagcacgtaagtggatgtggctgtgctgtaataaagcttcatttccaaacgcctgtggccagccgggagacggcgctgccgaggtgaagaaagcagacccacgtcgtgggacgggcgctcagagagagtgtgctctagcggttctgtctcccttcagcttttgaacgggctaaatcttgtgtgagccttcactcagcccaccttccctgctctctgtgaatttaagtcacagagtcgcagcagttctctgtgactttaagtctgtcgttgaggtggtgcgaagaggaggacttttctttttttgagacggagttttgctcttgttccccatgctggagtagaatggcgcaatctcagctcaccacaacctccgcctcttgggtttaagcaattctcctgcttcagcctcccgagtagctgggattaataggcatgtgccaccatgcccggctaattttgtatttttagtagagacgaggtttctccatgttggtcaggctggtcttgaactcctgacctcaggtgatccgcccacctcggcctctgaaagtgctggtattataggcgtgagccactgcgcctggcctgaggaggattttttaacccttttagcctgtctgccatgagagaggcacactgaatttgtattttattttattttatattttgttgagatagggtcttgcttcgttgcccaggctggagtacagtggcacaaacatgactcactgcagtctcaacctcccaggctcaagcagtcctcccacctcagcctcccatgtagctgcgaccaaaggtgcacaccaccacacctggctaatttttaaatttttttgtagagatggggtctttctttgtcaaagcccaggctcatctcaaactcctgggctcaagcagtcctcccacttcagcctcccaaagtgttgggattactggcatgagccactgggcatggcctaaagatagttcataatgaaaactcctatttggttttgtggaagtgggaggatgtattatttgtggacacgttagtgttgggctgtggatacgatgtgatttgtctgcttgcatcgtggagcggaaggtgctggcagtgcgcgtytctggtgctgtgggcgctcaggtatttggcaccgtgggctgccccgacatcttttcttcaccttgctccacttgtgccctgcccttacagatggtagcatcgacaaggctccctgtggaccctgccccgccctgcccacggcctctgcccacctcttctacctcgtccctcgcgcctgtgagtggctccggcccaggaccctcccctgctcgatcctctccagtaaatagaccttcctcagccaccaataaggcactatctccagtcacttcccggaccccaggggtggtggcatctgcccccaccaaaccacagagtcctgctcagaatgccacctcgtcccaagacagttctcaggatacgctgacagaacaaataactctggtaagcatgcttaagaaagttgtaaaatgtactccagttggtgaagcacatttagttttaattgtcaagaatgtgatggcgtaaaaccgaatgcctggtcaattcagcatggcttgggaatcagtagacacaagatgaaaaccaagggttagccttttctgttggaagcagactcatgggggcagtctgcgtttttgtgataaagcctgcagtcttgggctgctttcatatgggcagtagacgagggtgggagaggtcacgtgtagcagttaggckgagagggacaagcttgagcgctggggccctgcaggctgtgaggtccctgcagccaccagtctgcagccctgtgtttgagagtcactgcccagcccttagcacttactttgggttggatgactaagcatttattttgttcaacttcattaggggaattaaaagaaatgtgtatcaaaatagagtgtcataaaccccatgttccccattatttgattttatcacagtgatcagtatgcagctagtctcatttcatttatcccactcctttccagattatctagaagcaaattccagacatcctatggtttcccatgtaaacactttggtagaaacatgaggttttaaagttttagtctgttttatagagctggggcaggactattgctccagcttcttctaaggctcctggaagggtcacatgctcctagacctctcctagaaccactttgacctttgtgttcgaatcttacctttgatattaaactgggaccttgtgctttctctctttcttagtgcctgactgagccttttgcatagtagggcttcaaatttctggggtctgagttggtggaacacactcatcacatgccgaccccaccatcccccatgtatcatctacaggagaaccaggtgcatcagcgcattgcggagctgaggaaagcaggtctgtggtcccagaggcgtctgccaaagctgcaggaggccccacgccccaagtcccactgggactatctgctggaggagatgcagtggatggccacagactttgcccaggagaggaggtggaaggtggctgctgcgaagaaggtgggttggaatgcgtggagctgctgtgctgtgtgcgttggtgggggcttgagtttgcagtggtgtaagtggtggggaggtctccagacccactttttttttttttttttttttttttcccccagacagggtcttgctctgttgtccaggctggaatgtccagctaattttgtgttttttgccacattacccagactggtcttgaatcctgggctcaagtgattgctcgcctcggcctcctggagtgctgggattgcaggcgtgaaccactgtgcctggcagactcactctagaggccttaacctgtgaagtctgggaaggatacttccctgttgtttggagaataactgtgctgtgtaattaagtctctgaggtggtgtcttcagagcccagcatgcgttgttgggatcaagcctgtgctcagtgctcacccactaagcaatgatgtggatttagcttcattttgttgcctggctttgcctggcagttggagttaggatacctgcagtgccacaggttcaggctggtggctggggctgttcagggagctgagaggctaagagttagaaggcacctggtatcagtcaagggacagcaaggggctgtcctaggctttcctgcctggccacacggcctcctgcccttcctcctgggcttctagtctagctttctctttaattttggctgagaatttatttttctcctaactgttgccaaagcaggcgcagagtccttggaagactctggaggccctactgctaacactagaaaagtgagaacaagtggtagatttctagaaaccccaggcctcagtgggaagcagctgtgctttcactgtgtgaacagccgtggcccttctttatcctcctcattactgtgtcgctgcctctgtttcttgggccctagggtctttgttcatattttctgtactcttaacgctatggccttgtgttccatcccttgccctgtccactccgtacccagaattttcccccttgctgtcttcatgtagggtaggcagagagaagctgagaccacagggtgagaaccgtggggttctgagggtcaagggtctcaagtcagattcataagcattccagaaaaacccagattcttccttaaaccagcctttccacaaagaagatagtcctgaacatggtggacaccaggctggatagggcaggaggccagacgtgtagatgccaggctggacatgtggatgctgggctggatgggtgggggctggccgatgggctagagtgggagctggtggggttggctgaagagcagtgcagcacctacagggcacaggccagggccatctctcaacagctgagtgatgcatctgcagccaggcctgcccttccccgtgcctcctgcctctcgctggggtagacagggagaggctgcagagcagcccaccccgatcagggcctgtgttgacgacagtgagccccgttggaggccgagtgggaacacggcgtgtgcgcagagtcctggcggtagttgagtgcatttccatccctagaacgggcgtgggggtgacagccattgtgctctcagggctccaaaggttttctcatcttaattctctccacccatttgaggttctgttggtgggtatgtgaagtgtctaaacttttggaaagcagtttgacaatttaaagcaaaagctttaaaaatgtgaattatcgcagcccaataatttctataactggtgcagcattcatgaaatgagatgccgacccatgtttattgaatggagagatgttaatcatctattaaatgggaaaagaagattatagcacaatgtggtattctagttttgaggaaaataatgtgtatttggtgaaaagtataaaaacactttctagaaaagtcaagctaaatattgatggtggtttttgcttatagtcatgtttctcctaatccaccctaagagcatacgaggatgtatatgacagtgaattgtatgtaattttagtctgagaagatttaaaaaaagttacatatccttttttttccagcatgacatagagtacaacatacaattcttgcacttttattcaccagctcgttagaactgtggtgcgccatcacgaggagaagcagctccgtgaagaaagggggaagaaggaagagcagagcagactgaggcggatagccgcctccacggcccgggagatagagtgcttttggtcgaatattgaacaggcgagtgctgccgttgtcatggggtcgtaagaatcagtctgtcggagctggtgaggccacttcccgagaccagagctcgggcaccttgcttaggaagctttcgagcaccagagtcagcaacgtgtgcactctcctgggctgttgcttgttggcctttgaatgagctgctcgtgcctccgtctgtcttgcacrggggatgcacctcagctgtggctgccctctgaggtgcttcatgccgtggaggggctctgggcattgtttcrgggttagcgtgagtcaccaccacggttacttctagagcggtcgctcgctcacttgctttccttttttgaaattttaattcttacctcaccacctaatagaacctgggcaggatgtagttagtatgaaataaatgaaaaagcaccaaactgacgaggctggaaaacactgttttcagactctgcttatgtgctttagtgttttgtatgcagaacgtctgtaattcccatccttagtaatgtgcttattcatttaatcctttgcatttaggttgtggaaataaaactacgagtagaattagaagaaaaaaggaagaaggccttaaatttacagaaagtttccaggagaggtaggaccctttaaaaaaaggctcaccacgcttgggtggtattttgttcggattcttttctcagcaggcagtctcctggcgctgtggcttcccacagaggacatctgctcatcagccagctgcctgattgttacatttctctttgtgtggccatcctagttttatgcttcagtgcttttgagatgtgctagtgtgagtcagcacccccaagttgataaactctgggacacagaactggggttcagtccctggacagtgagtgaggagcttcctgaggtgtttgccatgcaggaggatccttgggtgcctggctgggtgacgccttcctttgatgtttcttcggcagctgcctccgctcgttatgtgccactccacttaggatgtgcacggcaccagtggcagcagcattcactgtttcctttgcctctgaggacacccccaggagggtgggcattgtgttcccccattattgatgaggaacccgaggctgagaggtggctgctgctgaaagtcatagagccacaagttagtaaaaaccactgccctgcgtgatgatgatgaggaggcagaactcacgcgtccttcctttccctgcacgtgggtggaggcagcaggaccctscctggaaagcagagacgccctcgccaagcatggggggccttgggaacgaactgtgctccttgtctctctagggaaagaattgagacctaaaggatttgacgcattmcaggaaagttctctggtaagtttggggttgttactgtgctgtgtgagaaggagtagaagcagctccagtagagtgggccttttcattcttatccagaggaatttgtaggctgtgactattacttcctttcttttcttttttttttttttttgttttagagacagagtcttgctctgtcgcccaggctggagtgaagtggcacgatctcagctcactgcaacctctgcctcccaggttcaagcaattctcctgcctcagcctcccgagtagctaggactataggcgcacgccaccacacctggctaattttttttttttgtattttagtagagatggggtttcaccgtgttgcccaggctggtctcaaactcctgagctcaggcattctgtccgccttggcctcccaaagtgctaggattacaggcgtgagctaccgtgccccgcctattactccctttcattatagactcagtctactttgaaaataaactggtgctttatagccttagtctcacgtggggtgttaatttggcagtgacagctgaacacagtgagcattgatcatgtcctcgctcccccgctgccctgccccgaccccaaatggaggctgagggcagcctagcaggcttgccccggggctcccccaacctgtcccatggacactgctgtcttggtttcccattctgagtgtttggatctcatgcttgtggtttttctttcttttctttcaggattcaggaatgtctggaagaaaaagaaaagctagcatatctttgactgatgacgaaggtctgttccccctcagcactatctttgtcatctccagggctgctgatgagatgacacagagctgcagcgacttggggtttagtcttgtcatcttcagctggttggaaagctcaacctttgtatttatccagatgtctctcagtgtatagagtactttttgtatctctagaggacttgggatgttttctggagcaacatggtcgtatctgctttttgaggtttggaaacttgggtgcatcttggagagtgttggggccccatgctcctgtggcacagggccaagcctgtttctgtccttgagaggtggccctggtatgtcctctggtagacccatggttgccagccattgggatttcaggagaaactcatgtgaattttagatgttggagaaacctggttcagatgagaacagatacctgagcactcagtgtgtgagctggggacagcccacggccatgacctatttccaaacccatgtggattgagtacagaagtcctcaggagtagactggatttttagagacagagtggggagcaggagtagagaggttggagaaactttcttgggcgtttgtgtggcggttcctgtcaggtgccaggtaaggcctgcagtttctccttcggctctttgatcagcatcagtgtggttttattggcttggtttggtgaagtgtgttaacttttccaaatttttgaagattgatctttgctatgtgttgatttttatttggaagtcaacagggagtttggccagattgttggcatgaaactggcagtattcagttctgctgcgtatgacagaaacaaaacaacagtgtggcagatgagtgaggagcctgagggcacatggcccaggactggcacagcattgtggtggcattttcaggcccctcccaagcgattctcttgcctcagcctcctgagtagctgagactacaggtgcggactactacgcagctaatttttgtatttttagtagagatggggtttcaccatgttggccaggctggtctcaaactcctgacctcaggtaatccacccgcctcagcctcccaaagtgctaggattacaggtgtgagccaccacacctggcctggtgctgaattctagatagtaccatcctgcactggggatggattgaactctggcctttcagacaacaagagaagcacaacagagtacagtaggtttgtgtctttcttgttacctggaaaggattaggtcatttcttcatgaggaacaccttttctctggcctgcactctggtagctgcggtcggctttatgtagattgacctctccgctttccttattttctcacattctcaggagcacatttgtgtacagtcatgtgtttcttaacaacggggatatattctgagagatgcgttgctggacaattttgttgttatgtgaacgtacaaagtactcacccaaacctagatggtgcagcctgtgcctccggctacaaacctgcacacaggtgactctcctgaatcctgtgggtaattggaatatagtggtatttgtgcatgtaaacatatcttgacacaggaaaggtaatgtaaagatacggtattacagtcttacagggtcccattgcatatgcggtccattgttggcagaaacggcattatgtggtgctcaactgtattgaaacagacttttatttgacttctgtttaatgcctaaagatgtcttagggtaactcagagaaggccaaattaaccacccgaggtcgtctttacttttcttttccaaaattccaccctggaaaccaagtgatcagaaggcagaaggaatggcagaaggcgtttccaagaggaggggatggccaggcctgtcgtgagccaccagggtgtcgagtacagtcaggaaaggcagcacctggaggcccagcgacttgtgtggttggggtcaggtgcctaggccttcttggtgggcagtgggggtcttgtagtgaagaaatgaggaagagttttgatggtaggaagggagagatgttatgttagattgtgagagaagaaaagttgagagccagctgagaggagagatggtgcaggccccctgcaggcccccaggtggggagagggtccgtggacagagggagtttggctgtggggatgctggtagctgctcttttctctgccaggagccaagatctctatggcgagtgaggcgtgaggttcagggctggagggctgaagagagcggagtgggcttgggttggtgattgtggaggacaggagagtcaaggagagtgttaggctgatgtggctgggcctcgtgagatgggcgatgatgacttcacggtgatcccagatggcatgcctgtgggctttccacagtggggctctgcaggaaggtaggagggttgacagcattccgtatgttggcctgaagaaggtctgccatgtgtggaaaaaccagggctgtcattcacagcctgaagtggaaggggaaatayacttccagtttcctgcccatttaattaaatttaacctgagaagtttaaaagctcagtttcaatttctgtaatagctatgcaaaataatttcgaagccttatagtgtgtaatgagtaacagacactcaagtggtgttgcctctcagtgacacttgctgataaccattttagtggacgatgaagaggaaacaattgaagaggaggaagcaaatgaaggcgttgtggaccaccaaacagaactttctaatttagccaaggaaggtaggctgttgctaccttattaaacattcagtaagtaaaaagaaacatttaaaacatgtgagatgtgaataataatatattgagtaacaacagcagcagtgcctgttttatggaaaacagtccctgtgtgcctcctgctgctctctctcctgacctggaggtcctggccctcctgggttgtgtgtcggacactgccctgactgtctttcttccctgccacctgcgtgtgtctccctgaatgtaccgttcatcttgagtgtgtgagaacttcatatgaatgaatccaccacagcttgactgaatgtgccgttcatcctgagtgtgtgagaacttcatgtgaatgaatcccaccacagcttgactgaatgtaccgttcatcttgagtgtgtgagaacttcataccaacgaatcccaccacagcttgactgaatgtaccgttcatcctgagtgtgtgagaacttcatgtgaatgaatccaccacagcttgactgaatgtaccgttcatcttgagtgtgtgagaacttcatgtgaatgaatcccaccacagcttgactgaatgtaccgttcatcttgagtgtgtgagaacttcatgtgaatgaatcccaccacagcttgactgaatgtaccgttcatcctgagtgtgtgagaacttcacgtgaatgaatccaccacagcttgactgaatgtgccgttcatcctgagtgtgtgagaacttcacgtgaatgaatccaccacagcttgactgaatgtgccgttcatcctgagtgtgtgagaacttcatgtgaacgaatcccaccacagcttgactgaatgtaccgttcatcttgagtgtgtgagaacttcatgtgaacgaatcccaccgcagcttgactgaatgtgccgttcatcctgagtgtgtgagaacttcatacgaacgaatcccaccacagcttgactgaatgtaccgttcatcctgagtgtgtgagaacttcatacgaacgaatcccaccacagcttgactgaatgtaccgttcatcctgagtgtgtgagaacttcatacgaacgaatccaccacagtttgatgggcttgctctctctactcagcctggatgtcctgagtttcagccacagtgttaggtgttgctatcagtgtctttgccaggcagtattctttttgtaaatatgtgaccgactcttttttgtgctgttggtggccattcacctggttccctgtgtttgctgtgagcattctcctattccccaggcacgtgtgcatgagtggcttgcctgtgctcaggggcaggagagtaactgttgtttagagtgggggtgccaagctccacatctcaggaaggaactcttttttttttttttttgagatggagtctcgctgtcacccaggctggagtgcagtggcgtgatctcggctcactgcaagctctgcctcctgggtttacgccattctcctgcctcagcctcctgagtagctgggactacagccgcccgccaccacgcccggctaattttttgtatttttagtagagatggggtttcaccatgttagccaggatgttctgcatctcctgacctcatgatccacccgcctcagcctcccgaagtgctgggattacaggcttgagccaccgcgcccagcctaagaaggaactctttttaaaaacaattacatatatatatctttagttttattgccattctttaattgctgtaacacatctcaagaactcttgatattgtctgccactctgggggtaaaaagtagtatctccttgtggctttaatttgcacttttgtgataactgatgaagtgaagcatcttttcgtgtttcttcctttgttcattttggcttattttggtgttttctttccttattgacttgttggtgatggtctttatatattctggacatgaattcttggtcagttctgtgttgcagtgacattttcccagttggtggtgtgtcttttcactctttgcagtacctttcgatgaaaggcgttcttaatttcagcatacagcaagtcctcatttaatgttgtcaataagttcctggaaactgcaactttaagtgaaatgacgttacattaatgttgttttattatagccatgaggaaaaaaaaattggttttgttatacagttgacccttgaacaatgtggggattaggagtgccaacccgcccccaccacctgcactgttgaaaatttgcatatagcttttgactccttcaaaacttactaatagcctactgttgactggaagccttatcaataacatgaaacagtcgatgaacacatattttatgtggtttttttctttttctttttttttttttgagacagagtctcactctgacacctaggctggagtgagtggcggatcacagctcattgcagccttgacttcttgggctcagacgatccttccacctcaggctcccaagtagctgggactatagtgcgcgctaccacgcccagctgatttttgtgttttttgtagatacgggatttcaggctagtctcaaactcctgggctcaagcgagcctcccatcttggcttcacaaagtgctgggtttacaggtgtgagccatcgtgcctggcctattttgtatgttatgtgtatttaatattacgtactgtattcttacaacaaagtaagctggagaaaagaaaatgttgttaaaaaataaggaagagaaaatacatttactatttattaagtggaagcgaataattataaaggtcttcatcctcgtcatcttcacgttgagtaggatgaggagggagtgggggagggggaggggaaggggttggtcctgctgtggataaaatctgcatggaagaggaccctcacagttccaacccaagttgtccaccgatcagctatacgtcattttgctcaaagttacaatttctaagaaccaacctattgatgatgtttagtgaggacttactgtagttgaatttgtcaatcttgttcacaaagatatatcatctaaaatttttctgcttttactcttaggttgtgaaatgagtgcagtttcctttttttccccaaaatgcatatttggaaagccatattgaaaagcctatcttttccccactgatcttaagtgccagctcagacgtaaaacaggtttccttctatgcatggctctttctgggatctttattcttttattggcaaatttgtaccagtctgtactgataccacactgtctttcttactatagctttataatagttcttgatgtctggttaggtaagttcttctgccttgctctgtgttaggaggatcttgtctatttggggactatttcagaaacatgctagaatcagctcatcaagtttcacagaaaaacctattgggagttttgattagaatttaattgcattaatggatgttttgtgagaattgctgtctttatgaagttcagcctttccagtctatgatcaaaatatagttctccccttcacttaggtcttcctaaatagctttccataaaatttcatgattgtgtctcttttgttagatttaattctaggtactatatatttttaaaagttgtgctaaatggtatattttctaaaattatattttaaatatattgctggtatgtgtcagtacagttgattttatttctcttatactcagcaacttttctgaactctgtttgttaattctttgtatacagtcttgtatacaaagactttgtatacagtcttgtatacaaagactttgtatacagtcttgtatacaaagactttgtatacagtcttgtatacaaagactttgtatacagtcttgtatacaaagwctttgtatacagtcttgtatacaaagtctttgtatacttctctgaagagtttttcctttataatccttgttccttttatactactttttcttgccgttttgtgctaggtaggactttcagtaaagtgttgagttcgtgctagtggtggacaacattggcttgttcttgctttgaaagagagcactttcagtagaaaggcagattattagagttttgagtcataactgcatggttcaaacctaatgtttgttgcctactgaccccacggcctcggtcaggttgtctgagctctccgtggtgtttttctcagttgtaaatgggataaccagtgttcttctgaggatttgcagtgcgtggaagccttggcctgacgtgtcctacggtgtgctcttcactgctgctctcaggatgactatgatgatacctttaatgtttcataaatggacatagtgtatagggttcttgtagatatttttataagattagtgaagtttgtatctattcttcagtgtttatgttgtaggtgggtattgcatgctttgtttgtttgttttgacagtcttgctctgtcgcccaggctggagtgcagtggcacgatctcagctcactgcaacctccgcctcctgggttcaagcgattctcctgcctcagcctcctgagtagctgggattataggcaccagccaccatgcctggctattttttatatttttagtagagatagggttttaccgtgttgcccaggctggtctccaactcctgacctcaggtgatctgcccacctgagcctcccaaagtgctggggttacaggctgagccaccgtgcctggccctcatacattaaattgaggaatatgactttttcttttcttcatagtcaattatgatagtcaaattttctaggaatttctttatttcatctacattttaaaatttattggcatacattgtcaataatttctccttacagtgtttccgatcttggctgtgtttgtatgtatgtcccttctttctcctaatactgtgtatttatgcctgttttcttgatagtcttgtcaaaagtttgtcagattctttttttttttttttaatctggcgcctgtatattgttttctgttttgtttctgctcgtagtatttcttttttaaaaacatctttttctgagtttttaacttggatgactagcttcctaattttcatcagctcattaatataaacatttaagggtctgaatttttccgtaatactgctttagctgaatatcatatttattattcagttttaaatattttctgatttcccctgtatatatattttattgacccatgagttatttagaaggatgtttcttartttccaaacaatacagggttttcaatatatatttttattattattctacattaattgcattttgatcagacagaagatgtatgggattctcactgacctggattttgttgaggtaggttttgaatggaccagtttataaacattccatacatgctttaaaacaacatgcattcatcaggttatggtacaattctctctctcagtccaccaggtagaacttgttgattgcattatccagttcttatccttactgatttttgtcttcttgctctatcaattactgagagaagtatgttaaaatgttccattatgataatgagtacctatttctccttaagtttctgtcagttttcattttatgtattttgagactatgttagtatgtgcatatataggtttagaattgttatcctattacgtcatcagttttacttgattctagataattttatcacatctgtgttstattttatgaattctcttttaagctcttcctagtcttttgttaacccattgattaagtgttaaattccagttaccagtttgttttaagacattcccaatggttttttagaaaacctacatgaaattttaaaattatctcttgctctgtattcagactttcagtcatctcttttatttcttcaaatatgaaattttataatctctgcctaataattgcatgggtgatgtttttgcaggtctgattctgctgtcgtttatgaatcctggtttctgctgatggtacattgtttcctagcgtactttgtgatttttgacaatttattggtgtagggaccagccccacagggtcggtgggtttcttcccaccgtgtgtggagacgagagattgtggaaataaagacacgagacaaagagataaaagaaaagacagctgggcccaggggaccactcccaccaagacgcggagactggtagtggccccgaatgtctggctgcgctattatttattggatacaaagcaaaaggggcagggtaaatagtgtgagtcatctccaatgataggtagggtcacgtgggttacgtgtccactggacagggggccctcccctgcctggcagccgaggcagagagagagagacagcttacgccattatttctgcatatcagagacttttagtactttcactaattttgctactgttatctaaaaggcagagccacgtgtacaggatggaacatgaaagcagactaggagtgtgaccactgaagcacagcatcacagggagacggttaggcctccggataactgtgcgtgggcctgactgatgtcagggcctccacaagaggtggaggagtagagtcttctctaaactccccacaaggaaagggagactccctttcccggtccgctaagtagcaggtgtttttccttgacactgaggctacaacaggcgtcttcccagatcctggcgttaccgctagacccaggagccctctggtggccctgtccgggcataacagaaggctcgcactcttgtcttctggtcactcctcactatgtctcctcagctcctatctctgtatgggctggcttttcctaggttatgattatagagcgaggattattataatattggaataaagagtaattgctacaaactagtgattaatgatattcgtatataatcatgtctatgatctagatctagtataactcttgttgttttatatattttattacactggaacagctcgtgccctcggtctcttgcctcggcacctggatggcttgccgcccacatattggaacttcattgtggaagttactttaggcctgacagtgaaggagtttcctctagagagagtttctgttaacttctgatctgtgttcttttgtaaagcatgtctcttgtaaacagcatatagttggtcttctctgccctacagtttattctaatgtccctatgtctctaaattggagtgtttagtacatttgtattaaatttaagcctgttctattaataattgggcctagatctatcctaattttaaaatttatcttgtattttctcacctgttctttagtcaatctctttatggttaaagcatcaggcaagtatttacaaattatttcatttcctcttctctgttagctttctgtattcttgttgtaggggctatctgattatggtgcgcattcttgacttactagatatcctattaaattagcgctgtatactctgtggggcagagtttgggagcagccttgctgggtggttgtggcacaggtctcctgtgaagatggttttcagaaggcttgatgtagcaggctggaggatgccattccaggctggttcattctgccagctgatgggctctggttgcatgctgagggcaggctgagtgtcctcctgacctggggctggtgtccgagagcaaatatccatgagggagcaggatagacactgtagtatcttttgtagctgagtcttggaagtcacctacggtcattctcacatatggtggtcacaccggtcaggccaggtcagtgtgggagagaccaggagtgaacaccaggaggtgggttcctggggatcccattgtctttatggtgtcgagctgaatccatgagcagagcctctcattgggtcaaggcttcttcatggtcttcaggaacctcttagagctttcttcacagagatgtggaatttttgaaagtttaattctaagtatatttagctcttcatgtccatgggtttcaaatccatgaatttgatcaactacagatagaaaatatttaccaaaaacaaaacaaagcaaaacagtaaaaaataagaacacagctgggtgtggtggctcacacctgtaatcctggctgcttgggagactgaggcaggatggtcacttgagcccaggagttcaagttcagcctgggcaacatagcaagaccccatctctaaaagaaatattaaaaaaaaaaaaaacagccaaccaaaaaaaccccccaaaccaaataagccaaaataacagtacaacaattacaaaaaagataccaaaaaaatgtgtaacaactatttacatagcattcacattgtattaggtattataagtaacctagagattatttaaaatatatgagaggatgtgtataggttacgtgcaaatatacattactttatataagggacttgagcatccttggattttggtatcgaaaggggccttggaaccaccttctcagggatactgagggacgactgtatttaattttctgtctaaacaggtttttttttcttcgatttcattttctaactcatttccatatgtggaggctgatttctgtgtattgtttgttctgagacaccttacagaattatcttcttactggaagtttccagtggtttggcttgtttttcctacttacatatagcatcatatgctgtagtggtgcatcccagcatttcgctctggaagcatcagacagacaggaaaggtgaagaaccttgttaggaacatcatggacacaccacctgaattccacagccaacacttactttcactgggctccattaggtctatgtccatcaagccagtgtggcaaatatttaacatcctgagcaaatgaattcaaaaagtgttttgctagtcccaagtggacagtgcctttaacatggtccttgtagggtgcttgtccatggcatttgttgttttggctcaacagtctttgacataaaatacagatgcaaacaagctcacatatcacaagtacacagcccaactaaagggttttcccctgttagatctaccactgtgtgaacattctttgaacagaaatctgggttcacatttctgtcattcctctggatagactcactaaaaggggaaatgatgaggttgagggcattggattccaaagcccttcagctttccgtgttgatttccagaaaaatccagccagtttatgccattatcagcagcatgtgggagtatctaattcataataatttcccagtgttatgattttaaggtggttgataatttggtacttaacaaattgtgcactgatttccagggatgattaatgaaaaaacattttattgccctttacacttttatgtatgtaacagcttcatatcctttgcccactgttattggggatttaattaatgtgtggtatttttttttaagcaattagggtgagtgttttataaaaaaagcttaattatgttttattatactttttaacatttttgctttttgtttcttcatttgatattttgtatttttatatatcatcttcatcagttatttcctatcaatggtgttcactttttacatttttatttattagtctatactgttactgttcatttagattatttcagatattttaaatcttttgtgaatacaattgagtttctttcaaagattctcatctttatagagaaaatattttatacttttaaaaatttgcataaatttcaggggtgcaagtacagtgctgtttcctggctgtactgtgtagtggtgaagtctgggtctctggtatgtcatgacccaaatgtgtgttgcacctactaagtaatttctcatcattccccttgcatcccccaacaaaatattttacaccttttatcagtaatgggcaaccattttagtttttagaaaaaacaagtgtgcttttagacaatataatctttttccaaggagtgatctaaagctggaaaaaggaatacatgtgagagggagccccttgcccttcttaccgtggttctcctggctgctgctccttcccaatttaaattacagttgttgttataaagtaacagcccttctgccygcaaccctctgcagctgagctgcccctcctggacctgatgaagctgtacgaaggcgccttcctgccgagttctcagtggccccggccgaagcctgatggggaggacacaagcggagaggaaggtgcgctcccagcctttggaagaattcagggttaaaagcagaagccggagtacttacaaagacttaaaataagatttagaaaatttcttttagtttgataaaataaaaaattagaaatatttaataagtatctttatattgaatagaattttattaaattccgtgcttttaatttattaacctggcacagttatcggggcacttgatcatgttgtgraggatgtaaaaatatttttctctagatttataaacatcattgttttatggacctagatatatttattcaggctgtgctgtgtttgttcaacacaccagttttgagtagtttattttacttggtattagactttctaaacagatgcacagagcataccagaaaaggtctgcctttcctgctctcattccagttgttgggacagttagacacctgcatgcgagttggggagtggcccacaggagccttggggaggtcaggccttaccagaccccacgctgccagcaggaccagaggaaggagtggcgggtttggtctcctcccggtttcccacatttgggaaagggttctgcttttttctttcttggtgatagacgggagatccctaaaccctgagacacctacatgtatctctctgtgataccagctcctaattgctatggagacattttccaaaatgccagactatttggggcaaattatactcttggagggctttccagaatggtccttggtttgatagtttcatgagagttctctcccatttatccaggtagcattgttagatattttggattacaaataaaaaattattgcctaattcagtatttaaagtagttggattctataaactttttcctgttttaaaaaaaggtttagatttataaagccttctcagtggccctcacttctctgttttattgtcgttacagatgcagatgactgtccaggcgacagggagagtcgcaaggacttggttctcatcgactcgcttttcatcatggatcagttcaaagctgccgagaggatgaatatcgggaagccaaacgccaaggacattgcggacgtcactgcggtggctgaagccatcctgccgaagggcagtgctcgggtcacaacctcggtgaggcgctaagctttcaagtgtgggatgggcctttgagagacagagcacatagcttagccatgagaaaagcttttcctcttcccagtgaaatggtctatcccaactgcagagttgtcagaaaaagcaattcttcatgtgcctgtagtcccagctactcaggagggtgaggcaagaggattgcttaaggccagatgttcaggcgttcaagaccagcttgggtgacctagcgagactcgatctccaaaagaagcaattcttcctcttcctgttttctgtagatcatttttgtggctttctaattggtttatcatgtgactgttgatttcagttttgagaaaaagtttgggtgattattttgacgagctgtcattcttttatttgttcatcactgcaggtcaagtttaatgctccatctttgttgtatggggctctcagagattatcagaagattggcctggactggctggccaaactttacaggaagaatctcaatggcatattggcagatgaagctgggctgggtaaaacagtgcagatcattgctttttttgcccacctagcttgtaacgaaggtaagagtttgctagtttttttaacaatacctatttgctaggacttacctataggccagtgtgtttgatgggagtgtggggacttggctatcttatctacttctttgctcctatctgttgacctgagcaaattgaggctcagaagtattcattttatgaatgaataaaaaactggttcacagttaacatccagtaacaattagtgaaaatctaataaaatacagagactcgtcaggctatgactgaaccttgtgactccagggtcaggtcactgtgcagtgtgtgggcagcagagcaggtggtccacttcccatgctgcttctagactggcatgaacccgccgttgggctctcagccgtgtggggtggtttgtggcatgcatcttggctcactgtatccttttcatgttatcatgtccatgcctcctctcgtccctcttgctggatttcacctgtcaatggggcagcgtttctgatccactgctcaggttccttagggaatgggcctgggtacactgtgtgggctcagtctctgcatggcagccccaactggctcttcaccctcctgacacttctagctggtacacagcttgtgtaggccctctggcctcctttccagtctttagagtcagctccttgttcactccccttcctctcttggcttttgggtcaagtgcccaccctagtctcctgctctgtgcctagctgcagaggaaggtgtgacttgtgtctctaacacaggacaaggtttcactgttcttgctcttgtaagagaagtgttcagtaaacatcttggaatgtggttcccactatatgttccagacttaaagtaggctttgctattgctgcagagaagaggggatttggccttgtctttacatttgagctttgaacgtaaagctggacacgtttaaattaggagggtcagcttagggaagcgatgaccccatgggtgctctgactgaaggctgtgtggaaagaaatggaacacagtgggcttgtggtgggggtctcagtccaagtagcttaaggagagagaggcagggctgagggtcccttcacctccagcgagggttcttttttttttgagatggagtttcactcttgttgcccaggctggaggtgtaatggcacgatcttggctcactgcaacctccgcctcctgggttcaagcgattctccagcctcagcctcccaagtagctgggattataggcatgcgccaccacacccagctaattttgtatttttagtagagatggggtttctccatgttggtcaggctggtctcgaactcccaacctcaggtgatccgcctgccttgaccttccaaaatgctgggattacaggcgtgagccaccgcacccggcctgagggttcttcttaacagttcccttctaagctgtttgcatagtttgccacagcactgttgttgaatacgtcttccttgccttctgttttgaaaaactcggtgcatctcatgataagtttttaagcataagcagatcaacttctgagcttcatattttcttccattatttgtttctgtctttggcccgtgtcacacagtttagatgtagtgctatagcatacattcatatgcatagttaattcaagatggaaaagctaccttgccttgctactttattatttgggttaaaagagtgttcactgttacaatagtaaaatattggaagtagcctatacattttttttttttttgagacagagtcttgctctttcacccaggccagagtgcactggtgcacccttggctcactgcacgttccgtctcctgggctcaagaggatcgcttgaggcctcctgggcaggaggatcaaggcgatcctcctgcctcagcctcccaagtagctgggactacagacgcttgtcactatgcctggctaatttttttgtatttttggtagagacagggtttcattatgttgcccaggctggtctggaactcctgagctcaagtgatccacccacctcagcctcccaaagtgctgggattacaggcgtgagacaccgtgcccagccttttttttttttyttttttttttaggagctgttgcccaggttggagtgcagtggcatgatcagggctcactacagccctgacttcccaggtgcaagtgatcctcccacctcagcctcctaaggagctacttaggaggctgaggtgggaggatcactgtaactgaacaaaaaactggctaagttttatatttttggcagagatagggttttgccatgttgccaggttggtcttgaactcctgggctcaagagatctgcctgccttggctgcccaaagtggtgggattacaggcatgagccatcgtgcccagcctggaagtagcctatgcttctaaaactaggggattgtgttttgtcagttgaacagatgagtgaatcagtcagcgttcattcatctgctccttacctgatgactgtcacagaccccaggcacttttctaggtcctgaggttgcagccctgctttcaggaaccccacactggtacagatgaaccttgaaatgggctaatgacccagcatagtgacaggagcctggccagctggagcaaggtctcagggagatggggcagtgggggtgggggctgcaagtgcagctggtgtccaggaacagcaccgaggccagtgtgagggtgagagggtaagagggtgtgaggggacggtgggggatgacaacagaaagattgcggtcagccacgatagaggcctatcaggccctgggagctgatgtggctttgccttagtgtgtggtctgcatcagtgcaggtgttggtacaggtgtctgctcaggctagagagcagtggtgtgatcatggctcactgcagcctcagcctcctgggctccagtgatcaaccctcctgcctcagcttcccaaatagctgggaatacaggtgtatgccaccacgcctggctaattttttttttttttttttttttttttggagagatgaggtcttactatgttaccctggctgatctcgaactcctggcctcaaaagatcctcctgccttggcttcccaaagtgctgggattagagagattacagctgtgagccaccgtgcctagccagcttttcttttttatttatttattttttaaatcttgtttttcactgggtgttaaaatatcatctggatttgatttgtgtttacctactctgaggttgtgtcttttttttttttttttgagacggagttttgctctgttgcccaggctggatggattgcagtggcgtgatctcagctcactgcaacctctgcctccgggttcaagtgattctccttcctcagcctcctgagtagctgggattacaggcacacgccaccacgcccagctaatttttgtatttttagtagagacagggtttcaccatattggtcaggccggtcttgaactcctgacctcctgatctgcctccctcagcctctgaaagtgttgtgattacaggtgtgagccactgcatgcagccggttgtgtcttttaaagagtttattgtcctgttatatttttttctttgtgacatttctgttcatatcctttgtttattttctattgggtggttcttttccaggatcagcaggaatgctttgcatattagcagtaatggccatagatggatgtgttgtaaatatttgtttaaagtctgctaagtctgtcttgtaacttggtttatgttacatttatagcacagaagttgaaatttgtatgtattcctctaataatctttaaaaaccttagttttctcgccaggcttggtggctcatgcctctaatcccagcacgttgggaggccgaggtaggcggggtcacctgaggtcaggagtttgagaccagcctggccaacatggtgacaccccgtctctactaaaaatacaaaaattagctgggcatgatggcgtgtgcctgtaatcccagctacacaggaggctgaggcaggagaatcgcttgaacctgggaggcagaggttgcagtgagccgagattgtgccgttggactccagcctgggtgacaagagcaacactccatcttaaaaaaaacaaaatcttagttttctgaagaatgaaatttgaaacaacatattttaggatggtttggatgtgccctgactaaagcttgggaagcagcgatggacacaagcccttggctaacaaaacacagtttagacgcctgctgtgtgggtgcctggcttgtgggaaggacttgagcagggtctggggctctcttagtctgtgagtccactttctgagtgttactcgtttcccctgggatcttggaggggttttctgtggtttgaatgaacactagtgtcttcttgggactgctcgttcaatgtgtgtctactaaggcctcctctggtgcaggcttggtgcttgtgcagcagcgccctgggggccaaggagcagcttctgggcagtgtgctggctccagatgaatgcacttgttcccccccaagtctgcctcagtcgtgcgatggytcatgtgacacatactcatactgatgaagcgtctctggtcagacacagtgctaggtgcctggacatgacagatactttgacgtggaaaattctgttttttgctttgtaggtaattggggcccccatcttgttgttgtgagaagttgtaacatactcaagtgggagcttgaattgaaacgttggtgtcccggactcaaaatcctctcatatattggcagccacagagaactcaaagcaaagagacaggtattttttttttaaacataaaataaagctaaacagaaagccatgttaatttttataaaagacacattaaaaaatgtgaagacatgcttattcatggaattattaaagatcactcattcatgagttaacagacctttatgttgttcccctcgaaagcatagacaataccgcatcggcctggccattccttgtgaggagggccacgcactcgcaggcccaggtgtgcacagatctcagtgtcactgcccagaaagtggggcagtttgctccgaaaatggtattctctgggacagtgcaacactttccccctggaggccctgctggcttccacaggcacagaggagaagctaggtgctcccagctctgaatttaaaacccatagaaccatttccacaacatgcctaatagataacgtttctggaacaaattttaacttattaaagatttttgtctgccctatagtttctagtactaggtcactgaaggtagattcatcacagttttccattgagtagaacgttttggaccattagacatcattgtgttgagtagtgtttactgaaaaagtgagctttcagtagtattttcttttttactattgtagtctgtttttggtgctattgcaaaataccacagactgggtaatttgtaagtatagaaatttatttctcacagttctggaggctgtgaagtccaagatccagatgccagcagatttagtgtctggtgagggcctggtttccgcttcccagatggggccttgctgctgcacattttggaggggacatggcggaagggatggaagggcaaaagggtccaagctggttccctccagccctttcatactgcacaagttcatccttgagagcagggaagtctccacttcttaatactaccaccatgggcattagatttcaacatgagttttggagggaacacattcaagccatagtactatgtctggcttttagtttgtttttaaaaagtgtataatgcagtcagttgcaatacagatgttgacatctcttatttttctgagcacacttccccttgttttgattagatactagaagagctcgccctgcttcaggatcctctgccataatctcagtattttccaaatggtaattgtcagcgcctgcaaaatagcttcttaatttgtcaacgaaactgctttagacccctagaggtagagataaaaacataaacacagccgttttctgtgcggtaatagcaagttatttaaaaaagcaagtaaaattataggtgggaacggagtcactgggtggcaagctttgggaagtgtgtgtcctcaaggtgattttgaaagacagtggagtgtgaaggcactgagctgtcctctctgtgctgcaggagtgggccgaacccaacagcttccacgtctgcatcacgtcctacactcagttcttccggggcctcaccgccttcacacgagtgcgctggaagtgcctggtcattgatgagatgcagcgcgtgaagggcatgaccgagaggcactgggaagcggttttcaccctgcagaggtctgtgtgttacgcgcytgtcattgagtgttctttgctgttgatgtagaagattctcttgaagaaatctgcataattgcagacacaaacaatggcctttgagctagagaattgcttttcatcttcatcccagcacatgggccagagagccccagagctgggtcagtgcagccccccttttcaggcatgtgcacgttgacatttgcggtgtcaaattactgtcccttttctcacacattgtcagagaagatgctgctgcagccagccccgtggctgtagaactccagtgttgtctcttgtcctgtttgcagccaacaacgtctgcttctgatcgactcgccgctgcacaataccttcctggagctctggaccatggtgcacttcctggtcccagggatctccaggccctacctgagctcccctctgagggcccccagtgaagagagccaggattactaccataaagtggtcataaggttacacagggtaggttgggttctgccatttcagttaattaattaaacatgcgtatgcctygttataaacgtgttacagcagcatttttggaaagaaaacagtaaacagtttttattttcaggtgacacagccatttattttgaggagaactaagagagatgtggaaaagcaactaacaaagaaatatgagcatgttttgaagtgtcgcctttctaaccgacaaaaagccttatacgaggacgttatcctgcaacctgggtgagtgtgggctctgggcatgtgccccctttgctgtccctgcctgtgagggaaaacggccctttctgtggcctcagcagaaagctcctttccgcaaggattgggtgtctggagctggagaccgaggcaccctcctgggggcagcaggctctgcagcctcaggtgtttccagctgtttcaggctcatgctggtcctgctgcacttcccgtctcagaagccccactcctgtgtagctgcccacgtgtagggtggtgtcctggtgctgctccctgtgttgcccagagaattctgtgaattttagtttccattcatccgggagggatggtgattgagcagctcgccttcccacagccagctggaggccccaggacttgggtcggctgtggcccaccggaggtggcacgctggtgtctgtggcgcaatgagtcgtgcgttgcatggggtggaatgcgccacgcaatgcacaccatgtgatggccagccgctgtgcctctgtctggcagggacgtgctggtgccagaagctgtgccctttgagttgacacagagtgtggggccccctttgaccctctccgaggtcttcagatgtgcatggttttggtctgtcaggctttccattttcctgagtttagatgaaaaaaacacaaaaaaccctggaaatcaagttttggaggatttgaaatttatctgtgcttagtcatcacacctcactctctgctgggggtgtggccatgaggctttgctgcagggttaccccctaccccgtgccacctcagcctcagcgtccctcacaggcacagtcagacacactggatcaggtgaccccactcttcccccagccacgtgctgatgtgctcccctccttgtggggagatgacatggggaccctgatgaggtgctgtggcgggagcagacgccaggtgatcgtatgagtgcactctggccgtggcacagcagactgtggtttgtggagactaggggtgaggccatgctagccacaccccaccccccgtcctgggtctccctctctgtgcctcatcctctgctctgggtctccttctctgtgcctcatcctctgctctgggtctccctctctgtgcctcatcctctgctctgcagccagagggcgtgcactcatgggctcgccagggttctgtgcatgcgcatgtggagcctgggcaccctcgagaggcaggtgcctgtgaatgcagcatgcttaatcctggtgagtggagatttcaggagggaaggtaagtgtgcatgatgactgtggaatttctcagtcctccacaaatgacacagtacaaccgtcctttctccaagaggcggagcagtggagcagcacttcattccacaccattagtggcgagactctccaagcattgtagaaactttgtatgtgtggacagaaaccgctttgccatgttgctgaagctctggtgtcagatttttcagtagaatactgaaatcagcctatgtcagctttggtaacatactagttgtcatttgagtggagaggactcataactttatgcaggttttgagcgccagcctatcagggaagtcacgttgaccacgccctgcgtacagagaccgtcttagggagtccgacccattgcccttctgtggttgtgcccacacaatatggtggtttgccttcagggttgcagtgtcgtctgaggtgtgagaggctggtggccctgggacctgttgggggaaagcacgtcttattctgctggtcttaggccagctttgtggcatctgctccctgggttaatggcaggagagcgcttggactcctcaagcacattttcctctttctttccgggcctgtgaaatcaagctttagtgcattaggtgtgcgcacgcctcgcccccctggagcacctggtaatcaagtgtttgggcgctgtctggtgcttgacgggatccttgggtggcccaggagcgtcctgtcctggtcagctcccccctcctcttgcagggaccatgccacacccgctgccgtgagggtggcacccatgtttctgtaccacgagctccagagctgccagaccagactccctacctgcccagacccccctgtgcttgtgccggcctctcctggttcctgttagccagggcaagttgcctttctgttaccagccagttcatatgggctttaagctccatcccttctccggaaccatccgtcgtctcagccattctttttgaagcatgtgatttgccctggcccttgtgcatgtaagtccttccctggcctcttttccttcccaccgctgctctctagagccaggctcacaggagctctcctgatgcttgtctccatttttcggtctccactcatttctcagcccccatgcaatgtgctcctcacgcatcaaggcctagctgtgtggggactcaggactccaggcgccgtctctcctgtggagccctcctgctttttttttcttttttttcctttttcttgagatggagtctcgctcttgtcacctaggctggagtgcagtggcacgatctgggctcactgcaacctctgcctcccaggttcaagtgattctcctgcctcagcctctcgagttgctgggattacaggcatgtgccaccacacctggctaattttttttgcatttttagtagagacggggttttaccatgttggccaggctggtctcaaacccctgacctctagtgatccgcccaccttggcctcccaaagtgctgggattgcaggcatgagccaccgcacccggccttggttgggttctgtggtgcgtactgctgtcatggtagcttctgtcacctgcacttgagctgacccttgagctcctcacgtccggcgtggcagaactgagctcgtgttttcccaagcctggctccctccctggtgttcctgttttagggtgtgcgccaccatcgaccaagttgtttgagttggaaatttgccattgctctctcctccctcctcttcccacaagtctgccatctccttcctgagtctctctcccgaccagttacctgtcgtcactatcaccccggtttcctccctcaggccgcctggtgcactgtgctcacaccagagagctactccccaccatggtcccatttcctgcccagccctggtcccagtgtgcgttgtaggtccttctgtctgcccccttcactgggtggtaagccgcacagggcatggacctgggtcctcgtctacccccgctcactgcctgcagggccagtgtaggaccaggcgtcagagctgccgagcgggtgtgtgaggggctttactctgctgcgctcaccctgcccctcactttgctcatcccccttggatgcccccacttctctttcagagcactcggtatgattgtgaatgaagtggagtggctgtctttccgtcagctctggtggggcggatgtcattctcaatggggatggcgaacaagtgcagaggggcctgcctgggatgtggacttgaatggccactctgtctaactcattaagcggacctagaaaatctgctcctgcctgcctttctggmgttgggacagtcgatggtgagggtgggactatgtccatrtgccgtttggattgaatgcttcgtgtttctttctccacgggcagcactcaggaggccttgaagagcgggcactttgtcaacgtcctgagcatccttgtgcggctgcagcgcatctgcaaccaccctgggctcgtcgagccccggcacccaggctcttcctacgtggcggggccactggagtatccgtccgcatctctaatcctgaaggcactggagagagatttctggaaggtaagtggaggatccagaaagcggaattactgttggrtatcttttctaggcacattatagataaaaccattcttggaaatgggttctcaaccagctcttctgcaattgcaattgcagctccgcgatacatggcaccgtctagcagcactgatggcctgccaccccttgccggagtgttccacctccggaaatttacccgagggagacaggctcacagagtggaaagatgcagagggcaggctttcttggcgttgtgtggattgtgggctgtgagaagtagctgagcatgcacgctcatcagcagagcttcaccaagggtgtggcagcacctgtgtattggcacggaggagggtctgcttgccgagtggccgttagagggggcgcgtctggatgcccacgttagggccctgccatagaaatcagttttgattcttaggtgctttttttgcctcttcatgcagcaagactttttttctttttctctctaggaagcagatctttctatgtttgatctcatcggcttagaaaataaaatcactcgtcacgaggcagagttgctgtctaagaaaaagataccgcggaaactcatggaggaaatctccacttcagcagccccagcagcccgaccagcagcagcaaagctgaaggccagcaggtgcgtgcgacccagaggcagcggggagggttggctcccagggcccccacagctgacccaggtctatgcgtggtgaaaagaaaggctgctaatgtagttaggttatctgctgctcttgggaccttgctggtgtccttggctgtggtatgcctggctctgcagatgccttttaggctgtgtggtgcagtgcaactgcttgcctccctgagcagcaacctccttgatcgtctttgcagcagttttagggtagggtgggtgtcagggctgcatttgacctggtgcctcgtgtggtggaggctggtgtggccgaaccacacatgtgtcgtgagtgtggcaggcagaggactccacccccacggtgatgtcattgtcttaacaagtgacatgtgagtgattctgaagtgatgcttttgcgggtgtcatgaggctgggagggacagacacgttagatgattaaaacgagatataaatgactcatagtctaaatctagcaattggaaatatccaaaatcctatgcttgggttaaaaagaaaggaaaggaaaggaaataggtatttggagatgaaggggccagctctgcagacagtcttgtgatccttgccattccaggagttctgcagtctttcttgttggcacttctgtatttggcttcactggggactttgagtggatcaccgtcccctcatcagtaccagaggtttctgcttagcttgaggactcacgacccagcaggctgctcctcagagagcctgcagccatcagttaaatgaacagcacccattccagtgggtgctagtctgtctttttaaaatggctttttacaaaaaagtttataaaagtttttaatagagacagaggtctccctgtgttgccaggctggtcttgaactcttgggctcaagggaccctcctgccttggtcccccaaagtggtagaattacaggtgtgagaccacacgcccggcctaaaaatggctttgatggccgtattctgcctgttacattgtataggggttttgaaaannnnnnnnnnnnnnnnnnnnnnnnnnnnnnnnnnnnnnnnnnnnnnnnnnnnnnnnnnnnnnnnnnnnnnnnnnnnnnnnnnnnnnnnnnnnnnnnnnnnnnnnnnnnnnnnnnnnnnnnnnnnnnnnnngcaacattgggagaccctgtctctccaaaaaaaaaaatcaaatccaggcgtggtggtgcacacctgtattcctagctacttagaggctgaggcaagaggattgcttgaagccgggagtttgaggcaacagtgaaccatcacttgaacggctgcttgatcagacttttgtcaagttgatgtttctcctcactcccctcagcccttgtgctgtaatagatgcgttgttttctatctacattgatatgattgtgaaagttaaaacagcattcacccttgtattcccaggaatctgggtggatgtaccataccactttggtgtacttagtcttgttagccactgcgcccgggcccggggtgagcttacctagagcagtacttaggcatctttccccttccctctgtaaactgcactctgggtgctggtccctgagctggcttcctatgggcagcggtgaaccccggctccatgaggtggcctgtcctctctgtggtctgatgctctgtatcttcttgcctggaccaatgggcatctaggttgtttcagcctgtgcagtatggccagaagcccgagggtcgcaccgtggctttccccagcactcacccgccccggacggcagcccccaccacggcctctgctgctccacagggcccgcttcgaggacggccgcccatcgccacgttctctgccaatccggaggcaaaaggtagacttcacgtagttgtctgctctccgccttatggaggtttttgtgggacaagttcatggcactttcttctcgcgcctctggatgcggtaattgtccctgagtgggaacaggcaccacccgctggctttctgaaggtgccttgtttagttcttgatgagttttagactttttgatggcttgtaatggatgttttccctattgaagaagcttcactcctaggtgataagtgttgatctgatgctcacagccactgggcaggctgtttctgttgacagaggtgcgtgcgtgcagtcgtctaggagactcctgagaacgtctgctcatattgtattttgtgctgtcacttgaacttaattattcttttgaggaagggtagagtagaaaaggccatcaaaagagttaaaagtagtatttcaccacctggccaaaggggccctccacgccatgtccatccaggttttctgagctaaaaataaatgctcagacctgcattgttgccagcattctctatagaaatatgagtggaagctctgttgatgttttctttgtgtgtttaggaaatagtttctaattgatactaatgtttggttgggctgacttctaacagtttctgtttactctgagaaatgtaccgcgtagcgtactgtagctcgaagtgaagataattatcaacaagtaaaattatatttctctcaccctgtaaactatatggcccctctttttttccttaagaggggacttctcatttgagagacggtgtgaaatgtttattttatttctttaaaattcrgtttaaaatattgtattttattaagaacctctaacagctttgcacaaacaaaccttatcgattgcagcagcagcagccccgtttcagacctctcaggcttccgccagtgctccacgacaccagcccgcctcggcctccagcacagccgctagcccggcccatcctgcgaaactgcgggcccagaccacagcacaggcctccaccccaggccagcccccgccccagccccaggccccctcgcacgcggccgggcagagcgcgctgcctcagaggctggtgctcccctcgcaggcccaggcccgcttgcccagtaagtggcctcacctttccaggtttctgccatctctctaccccagaggagttgtgttaagaacacggggatgtaggaggagccttgctgtccactcctttgtctttccccagccccatgcccggtgctgcctctcaccagtgcagctgcctccggcatgagtctagcagggagcgcctctgtggaggccacatccggccttctcctgtctgtgctctctctcctgaccccgccatccagctctgcttttctgctgcactcactcactgctttggtgctgtggacggcacttcccagtgttagccccggccttgttccaccagccacacaggtgcactctgggggagcagatgctcctagagtgacagcgactgcatttgggaaggtcgcttccttgccagtcatgtgaactagctttaggttcctaaaaaacattagctctttttagtctctcgcctgttaccaaatttaaacttgggattgctcaaccaagataacttgtaataatttatgacttaaaaaacacagttattaatttttttaatacagaacattttgctgtgtccagtgggattagtatgttttcaaaccttacatgtaccctattcattctgtggtggaaattatcctgacttaaagtattatgttatttctcaagtgccacctcaactccttttgttgttggtatagccaaattatgtggaggcctttctggaaagatgcagatgggagagggagtgatgcacagagacacttgagttcaaactaattctctttccttacaagtctctctctcccattgcccaaaaataaagaggaattgtcctagttaagtgccctaagggagaaagcagttgcatattttacatcttcatcaaactagacactgtcttgcgtgggatgagagtcatgttggtggttgccagaggagctgttctttgggagatctgtgaagtgagcaaaactgcttttcctgtgggtcggtcctcacctgtgtatggaacaaggaggattgttgagagattgacacttctatgcacaaatctctgtcttctgttttcattttcccctccttgttcacggttattctgtgggcaagatatctctagacatttttctagcctcttactaactattctttttatcatatcactaataattctggcatggatttctcgggaagaacatttagattcaagtatcaaccattgggaaataagtctttaaacctgttgttcagttgtagccggaaggtagtacctttttgagttgggggmaaatgaccacatctgagttatgttttttcaaaaaaagtgttttaagcaacgctaagttttactttttttttttttaaacagtaaatgttatagattgacgcttaccatctaattcaaattagtatgaagctttatatcttaaagctttatttatgtatgtgatttctttatgtatctagaggcattgctagatcttgtagacaccgtggctcacacctgtaggcccagctgcttgggaggctgaggtgggaggatcgcttgaacccaggagtttgaggctgcagtgagctataatcctgctactgccctccagcttgggtgacagccagaccctgtctctcacaaaataaataaaaatacattcttagattttgaagagttatgggtgtaattgaagctagttatttttttatatttgtaaagatataatctctctttgtgagctaaattggacaggtacttttcacatttttaaagttctctaaagtttaggttcatatgtgagtttccaagtgtattacaaatacatttctgctttttttttttttttggagatggagtttcactcttgttgcccagactggggtgcaatggcctgatcttagttcactgcaacctctgcctcccgggttcaagcaattcttctgcctcagcctcgtgtgtagctcggattacaggcgcccaccaccatgcccagctaattttttttttttttttttttttttttttgcatttctagtagagatgggttttcaccctgttgtccaggctggtctcraactcctgacctcatgtgatccacccacctcagcctcccaaagtgctgggattacaggcatgtgccactgcacccagctgatttctgctatttttgttgtttcggtagaaaagtaaaatgttccttaatagcttcgttaataatatcaatatctgatatctaaaatcccaaccaattatggttaagtaaagttaaccattaaaatctgacattttgttttctctttttaattaaaataattatttttaagaagtggtagaaaacactacctgataaacatttctgtggtgcttcagtttatgatagatggtcattatatacaagaaacgactgtcaatatgacactcccaaattttttccaaaatgatctgaattcaccttttcctctacgtttcaacaggtggagaggtagtgaaaatagctcagctggcatccatcacaggaccacagagccgcgtggctcagccrgagacgccggtgacactgcagttccagggcagcaagttcaccctgtcacacagccagctccggcagctcacagcgggccagccgctgcagctgcaaggtaaggataaggatgagagagcactgatgccaaaaatgacaaaagcgcctcaccatgagccctgctgcccacgggcctgccttgtgcatttaagtgtcaggcttttccctgtgtccgatgatgcatctcacctcatgggttcatggaagaccagcgagatgacgttcatcagccaccgggttgcctgcacttgatgcgtgtcagataaacaacaggcactttcgttaccagcatctgcgctttgaagagagtttcgtattttgtagatcaaagtagaaatatttggccaggcgtggtggtgctctcctgtggtccaagctactcaggaggctgaggtgggaagatcacctgagccccagaggttgaaactgcagtgagccgagatcgtgtcactgcactccagcctgggtcacagactgagaccccatctctaagtaatagataagtaacagaaatatttgctgctttctaatataggtgtgagacaaattgtccctaaaacaccacaggattagtaattttatgtatgagaaatcattttcttctatcagcagacttaattttaactcccagacccaaagcccagacctttggtgaagagcagtgtgtttatatagtaactgctctttaaaaaaagtgagggagaggaattgagtggcgccttgtccccgtggtgggatcatttgctccctgtgtttttgtttagggctcaaggaacacccacagcagcccccgcagcctccttcccccaccttcctcgacagcagcctcagcrgctaccttcccccaccttcctcgacagcagcctcagcggctaccttccctcaccttcctcgacagcagcctcagcggctgcctccccgccacccccccacagcagccccggtggcaccttcccccaccttccctcaccttccttcaccttccgtgactgcagcctcagcgactgccttcccccagtgctttcctcatgattgctgcctgtggcacttgtcagggtggagggtttcatcatcagtagggtgagcccactgacctccttagagagacacacacgtctcagcagaacaaggcctgccacagagaaacgattcagtctggtttacttcctttttttttttcttaaaacaaaacaaaacaaaacaaaacattttttggcccacagaggctgggtcgcttggtaacatctctgatggccgccggtttattcatagagatgacctgggaaactatcttctccagagtaaaagaagtcagaaagatgtagtcacacaagatccaaagtggcagcctcgttaaacagcagcagaaaagccacaggcatctgggctaaaaacagggttttgttctatttcttcattctccttgactgctgtgatctgggagtggggatgtccgcctcagtacctcgaacagcatggcaggtcctcagcagctgtgtgtcacccaccttccatgagggacagagggtagatggccttttcttgacayggagcaagataccttgtctcttagtgtgtcgtcatccactgtcggtgatgggttgccactttcctcacagtaactgaactttgcattgatttttttgtgtagatttgattttcagtttgtcaacttatttttgtactgtttggaagtgcctggagtgtgtggctgtgatgtacacatgcctgtcattgacacctagtggacctatgattgcaggcagcgtcctccagatcgtgtccgcccccgggcagccctaccttcgagcccctggccctgtggtgatgcagaccgtgtctcaggcgggcgctgtgcacggcgccctgggaagcaagcccccggccggcggtcccagccctgcacccttgaccccacaaggtagggtgctctgagcaggagggagacttggcttggatgcttctttctcttccatctaaggcgagtggaaagcattcatgtgtctttgactgtatctcagaacagcacagtctagtgtgtggccatctctgatttctatagatgtgtcctagtgtcagcctgatttattttctttttcttgtgctttcaaaggtattggttggatataaccagcctccactgtccttaggtttttgttttgtttgtgttctcacaagaaatttggaatcatgagaaatcttgcttgtttgtatatcgccagtgtgctccgtttcccctgggagtgggagtgtgtggccgcccacgcagggtctggttctttgtccggcccgagctgccactcctcatcctgtctcgccacctgcttcacctctgagtccccgctctgtgcctgccttggccccaggtctctctggacatgctctgtcatgatgtggtgtgtcctctggaacccagagacccgtggaggcaggtgggagcctagaggggtgaggctctctccttgggatggagcccttgtcctggtggccgagtggtgtccattcagttccagccccacctttgcatagtgggcagtgatgttgggtgggtcactgccaacctgttaggctctgttagttatcagaggaggctgcaaggctggagtggggaggggccatggcttgttctccagtcctgttagcatcacctagcagcagtcctgcatgccagcatggtcagcagttccactcaccaggttttgccgctacccccagaaccaggcatcttggggattccagaaccagctgctgcacccttctttgcgggctgatgagtcactgtcccgtggaagccctcctcagcttcagaggccccagtaccaactggagtcctggaccctgagggtctgagctcagacacccccacccccaagtgctgagttctgacaacctcagcctctcctcttgtttttccctaaggtgactcttacccctgggccccttttcagcactcagacacctctttgaccacatctttgtaggaaagtctgccgcactaagtggcatggcttctgccttcctgattggccctggctggtagcaggtgtcatgtcaggagcagctccagggaacggatatgaaacgggcactggcttgctctgttgcagttgtgaggactgggtggacttcctgccggggctgggctgctcatggcaggcaagggcctcacagtcatcaggcggtcacctgggctaggaggtggccatgtgctgatggcgatggggtacccagggcctcggaggtgtgctgggatgcttctgggtggctctggagtgcctcccaaaagaaagggataagctgctggctccattcagctccagtcatggcctgcgagccagcatgcttccgtggcaggtctaaagcatttaagtttgagcccatgcacattccaggcatgtgctggtggaggatgaggacttggggacatgccgttgcagaatgactttctgtggagtgtgctggtggagggtgaggttccatggagcatgctggtgtcagatgaaatcctgtgaacttggcgttccttttcacctcttcctttatgcatttgtagttggcgttccgggccgcgtggcggtgaatgccttggctgtaggagaacccggaacggcctccaaaccagcttctcccattggagggccgacccaggtaagcacctgagcttgagaccccggtgcacgtggacaggtagctttccaagagctgctcgttgtgtttggttgtgatatttaaaggctcctgtgaattctcaagtgatgttactgaattcttattttaaaacacacattttctaataaaataaatgaaactggacttacgactgccacaatctwtttttgtattttttatgtccttctgcaagtcttcctgggcattagaattgctcacttgtgtcttgagaaatacttcccatcttggcaaagaagagaacgcttgtgctctcggcttcatttccatctctatttcctgtagctctcggcttcatttctatctctatttcctgtaacacaagaccggggatattgaagtggatctcatatgtgrgaaatcacgggctgggtggggggttggtgaagacaggaacttgtcattctgtttctcaagtaactgtttttcatcactttttgataaaggaggaaaagaccagactcttgaaagagcgcctggatcagatttatttagtcaacgagcggcgctgttctcaagctccagtctatggcagagacttgctaaggatttgtgccctgcctagccatggaagggtacagtggcgtgggtccctggatggccgtcgtgggaaggaggccgggccagcrcacagttacacttcatcctcagaaagtccaagtgagctgatgttgacgctttgtcggtgtggagagtctctgcaggatgttattgacaggtactgcagacctcgtgaccttttcggtgctctctggctgcattgcaccccggcmagaccccttcttgtctcgtggatgtacatcttactcccatcggcttctccccacgctgtcccttagcggtctgttttgaagttagtctttgaggtcttcagctttgggatcagatggttttgttatctgggtctcagtgccaggtgcggcttctgaaggaagttggcagccctgggggcagagccgcagcactgagctcacactgtgcytggggacagatcactgtgttgctaaggactttctccatttgactctttcaaaaaatgattgcattaaaagagccccatgagtgagtgaacattacatgatgacaaatgtgggcaggagttgatctcagaacgtgctttaatggagagcaaatctgagcaccggtgggcacggtgggcacccggccgctctcaactgagcttgctttcagtagagtgcgttaccctgtttgcatttccactccctgcttggaccccatctccaggctccacttcagacatgttttcttcccttctttgcagctgttgtagttctcagttgtctcctgtctgcagagggcaacctggcttcttcctgtgccttggctcagctcagctttcaggatctacctatttcagttctttcagatcaggaagcagaattaatggaaaaaaagaaaactgggagtgcttctccaaggccgaacaagccacttctggcttctcctggtctgggagtgactatgtcagtgaccttgtgctcctggagtttttctttcgagtactgatttgtctttgtgtactcctccctcattgaacatcatgggtgaccattcgttcagtttgaatacagctgggagtgagtcatagttgatgtccatagcaagggccttctggtgcaggtgacctccacaggttgcaaggtgggccttaggttggctgtgcgatcttcgctctattgtcattgtcctgaaggctccttcaccctgagtctggcccccgtcctggtggcacagtggctatagcagttctagggtccacgagacagtgcacctttgtcccaaagtttccagctgaagacacactagaaagagaatggcttatctctgacctggtgcctgcggcctagggaatccacccccattgatccatcagccctggactgtctgaattagtccccgaggtggtggttattggccaggactggttaggatctgcctcgttgggcccctgcccgtgtgccaacacccacatccccatgtgactgggttgagccctgctgtttcctgggacttggactgtcagaagtctgccccatctttcaggagcccccatgctgggtgaaggtgtgtggctcctggtggtgacaaaacatgctttctgctcctcagggtggcctttgtgattcctccggtggtggcagcacccccgtccctacgggtgccgcggccgccacccctgtacagccacagaatgaggatcttgaggcagggcctgagagagcacgctgcgccgtacttccagcagctgcggcagaccacggctccacgcctgctgcagttccctgagctgaggctggtgcagttcgactcaggtatgcggcagttgggggcgtggcccgtgcgggagctgcacyggccctggatgatgaggcgctcttgatgtgattcgtttcccagggaagttggaagctttagctatcttgcttcagaaattgaaatctgaaggacgtcgggtgctgattttatcacagatgattcttatgttggacattttagagatgttcttgaacttccattacctcacctatgtaagaatcgatgaaaatgccagcagtgagcaacggcaggtgagaagcacattgtttacattgtctctgatgggtcagtcactggtgttgaatgcctaagtgctgtgtaaattcagtggtctcatggcccttctaagtgaaaggggagggacttaatgagcttctgaactttttaaagtctcaatccatccttcgatattttttattaaaagccacgttgttaggtaaatgcagtcttgatgtctcagaataaatgccggtgacctgcaatcatcattaagacgatactggcgtacttcaagaggtggctacagggtaaaaatatgaaaacaattccaaccaatttagaatgaagggaaatacaagttagggtaatatgcccattgtttacttacaagatttgccaaggctgttttgtttcatcaggcacagtgagtcagacactctcatatcctcccgtgaaagcataaactagtatagttctagaaggcagcctggcagtatggatttgaaccttamtagtgatgtatgcttgacctagtaattctgtatttaggaccctttacttacatgacaacaaacacaccacttaagatctgtctacatagttgttgttgaaatgtttatggtaattcacagttgagaacaaagtcagtgttcagcagaagagtgagtgcataaggggttgtccatgggccccgtgccctggcagcttcatgagcagaaactgcccagcatttcacgtggtgtgctaggcccttgtcagcagcatttcagagccagttttagtagcatggcccagtgtcccccagcgcaaaaccaagttgctgccctgtaagtcgcgcagcctgctttatctcacacacacgctcatgtacacgctggagaggcctagaaagaaatagagcaaaaggtgatttaacaagttttcttggtaatattatagcaaattatctgtagaatgcctggaaggaagagagttggtcagtgattaggtttcgtttctggcacagaaatcgttatggaagaaaagtattcaagtcatctcccttcatggtcaacagtgaggttagaggactatccttcacggttttgtttttcctgcttcctcagccttactccagggactttttgttgcctgtaaagtgctctggcattgcctgaggatagatgagaaagcacatatccctccccagtaagacgctgttttcttttggggcctacaagttgagctgacagtaaatgcaaggtggactctaactttttccttcttgtcactcatggctgatgttatttaaactgtgcatgagggtgttggcgatgggtgagcgtaagatgatagtggctgcacagaagagctggaatacagtgcggggaccttggtgttgctttaacatgagcctcgtgttgaatggaatacaaaccaagcagttttgctatgggataatttcttttttgagacagagtcctgctctgtcgccgaggctggagtacagtggcgcaatcttggctcactgcaggctcctcccgggttcacgccattctcctgccacagcctcccaagtagctgggactgcaggcrcctgccaccacgcccggctaattttttgtatttttagtagagacggggtttcgccatgttagccaggatgatctcgatctgctgaccttgtgatccacccacctcggcctcccaaagtgctgggattacaggtgtgagcygccacgcccggcctgctgtgggattatttctaattaataaatgttgaaacgtgtcaaaggtttcccaacattttccaagaatactaactcctgtgttttgtttcatcttaggaactgatgaggagtttcaacagagacaggcggattttttgtgccattctctccactcacagccgtaccacaggtataaaccttgtagaggcggacaccgtcgtgttttatgacaatgacctgaatccagtgatggatgccaaagctcaggagtggtgcgataggatcgggagatgcaaagacatccacatatacaggtgagggcctgcgggggataggatcaggagatgcaaagacatccacatatacaggtgagggcctgcggggatggccgcgtggaaatggagtcaatgagaagctttgcaggagatattggtgcaagaagcactaatgcagaaacaaaaggtagcactaaagacaatgcatgatatctaattttaaactagggtttgttttccttcagacaaacttacatttctgctattttatctatctattccttttatttatactcaacatttgcttgaaattgtaagttagtgatgctgctcacacaagtcatcttgccatcttcagtttttacgtgtggtacctcttgcagagtatctcagtcttaaaagtacgatttagattttgggttgttttaattatgaactataaattatctgttagtaaaatggctattgaaagaatggtcaacacctgtgaaaagaagagaaaagagaattagtttttttttttttttttcttttttttgagatggagtcttactctgtcgctcaggcggtagtgcagtggcacgatcttggctcaccgcgacctctgtctcccgggttcaagcaattcttctgcctcagcctcccgaatagctgggactacaggcgtgcaccaccacgaccggctagtttttgtatttttagtagagacggagttttaccacattggccaggccggtctcgaactcctgacctcgtgatccgcccgccgtggcctcccaaagtgctgggattacaggcatgagccactgtgcccagccaaaatctattattatgtttttgtttgtttgttttttgagacggagtttcgctcttgttagccaggctggagtgcaatggcgtgatcctggttcaccgcaacctccacctcctgggttcaagcgattcttccgcctcagccccccgaggagctgaggttacaggtgcgcgccaccatgccctgctagtttttgtatttttagtagaaacggggtttcaccatgttggccaggctgatcttggaactcccgacctcaggtgatcgcccgccttggcctccyaaagtgctgggattataggtgtgagccaccgcgcctggcctattattatctgtaaagataaaaactataactgtcaaaacacaattgggggaaatggggaaaggttactgtatatttttaaatttctaagtgcttactgttacagtgtaatagtagatttacttcttctgcttattttatgcctggttgtgtgccgagcacatcctgggctcacctctcatggtgacccgtcagttcccagtagggagcctgagactagacaaatatggtccctgcatgaggtctcctaggtggtagctgaccctggaactaaaacccaagtgtgctttaacctctttttttttttttttgagacggtctgttgcccaggctggagtgcagtggcatgatcttggctcactgacgcttctatctcctaggctcaggtaatcctcccggctcagcctcccaagtggctgggactacaggtgtgcagtaccatgcctggctaatgtttgtattttttgcacagacagggttttgctgtgttgcccaggctggtcccaaactcctgggctcaaacagtcagcccgcctcagcctcccaaaatgctgggattacaggcatgagtcactgcacccggccaaccatttgttttttaacaagatggttggtgtcatagtaattcaaatgctgtatttaaattgttttattattatttttcttgctataaatgcattacatgttcctcgagggaaaaaaggagagcctgtaaagaaaaacaaggatcctgcagaggcagcaattattaacattcagttgcacatcttcccagacacgcttctgcttcttgaagaaggctcacactgtgtcttcttttgtaaactttttttttcttttaacagtacattatacatacatttccatggtgatgaatataagtttggtgcatggtttatgttgaatggataagggcttagtgtggaatccattctgcattgttggcccttagcaattactagccagaaattggaaaagtgttgtattctcagtatcaataaagtctcaggcatggccttagcggtgcaggaacagggcatctgaagtgaggcatgaggtggccttgaaggatgcaggatgggctgtgccaagtgtgaagacacactttgttctcgagtgggtagacttcattcatgaacatgtgaagtttctccaaagtaatactaaaatttaatatatttttgtgaaaacgctcctcatgggtgtgaaggttctatgcgtgcacacacacggttgggtaaggtggtgccaatgtgcttgcagtgtggacgtcctgatgaaggccgccatcatgatgctcagtgttgcgggtgggagtgtgccccactatgagccatgggaacccccaaactgcataagggtgctgttggtgtcggggcagatagcccggcacccatggggatttcgcatgttacaaaggttggctgtcgcagtaactggagggcctttctgtcatgaatgtgccgcacaccttgtgctccacgagtgagaggaggggcttggagtgctgctcccacgcctgaccatggcggagtccagagggatgaaggacttgaatgttttcggtggagcagcagtgttagaacactcttgaagagacagtacctgtggccgagagctggaagggaccgcctgacccacacagaccccaaagtcaggggagacaggcacacagctgcagtgagacaggaagccaagcgttgtacagatacggtgagcccagtggacaggcgggtgatagaacagggagatttgccattctcagtgcaagtaaagagttaaatacctcttaaaaatcgagaagatacataaagacccccccttactcttaaataggaagggcctgtgaatatgaacagtccatcccaattggccagaaagtgtgagaggccgctccagctcactggtctggagaaggaaggaccagtttaatgcacgatgagatctctcttctcatgccccggacaggtgagaccttaagggaacgagcctgttcagcctggcactagaaaaggggacgtcctcatgttgatggggatgtgggattgctatctaaggatgtgtgtcgcagctttgtcacatggcacaaagcagtcactggggcacagccatcccacggtgttgagcagccaggtggaaaatgagctcatgtcgagggatttctgtaatacactgcttagggaggacagcaaaatgcagagaagtgggaagtaaggcggacattttccccacacggttgtgcacgaagtgacggtacatggagcatcgtggaagggcacacccaggttcacacacacagcatcgtggaacaacacacccaggttcacacggaacgtcatggaagggcacacccaggttcacacggaacgtcgtggaagggcacacccaggttcacacacacagcatcgtggaacgacacacccaggttcacacagaacgtcatggaagggcacacccaggttcacatggaacgctgtggaagcgcacacccaggttcacatggaacgtcttggaagcacacagccaggttcacacggaacgtcgtggaaggacatacccaggttcacgcggaacatcgtggaaggacacacccaggttcacacggggcattgtggaatgacacacccaggttcacacggaacgtcgtggaagggcacacccaggttcacacggaacgtcgtggaagggcacacccaggttcacacacacagcatcgtggaacgacacacccaggttcacacggaacgtcatggaagggcacacccaggttcacatggaacgctgtggaagcacacacccaggttcacacggaacgtcttagaagcacacagccaggttcacacggaatgtcgtggaaggacacacccgggttcacacggagcattgtggaacacacccaggttcacatggagcatcatggaacaacacacccaggttcacacggaacgtcatggaagcacacagccaggttcacgcggaacgtcatggaaggacacacccaggttcacacggaacgtcgtgggaaggacacacccaggttcgcacggaatgtcgtggaagcacacacccaggttcatacggaacatcgtggaagggcacacacaggttcacatggaacatcgtggaaggacacacccgggttcacacggagcatcgtggaacaacacacccaggttcacatggagcatcatggaacaacacacccaggttcacacggaacgtcgtggaagcacgcacccaggttcacactgacgtggctgctggggcggggggcaggagaggcaggccaccctccctgaagcagccatgaaatatgccagttaggaaaagtgtgcccgcggaagcgcacactgtcacacgtgcagcagcaccttcttgtgaaccaaggtgggtggaaatgccatccccactttttttagtggttctcagggtgattggaatccaggcgatttttgttttgttttgtttcttatgcttttatgtaatcaaataatttatgatgagcatgtagtaatataatcaagaaagagtagattttcatttaaaggccaggaaagtcttcccaggtggtggtttgctgttgatgaagttgtccatccactatttccctttatcacgtatttagttcctttgtttgtgtctgggttcacgtcttcactttccgtgctgttccctatgatkgtttctctttaatatttaggatccttttaatttggaattttctgaaaaaaattttgttttcatctctgaaaatcatgctgttaaagttgtttaatgtgagcttttttgrggtttagcatttagcattttacaggcagatgagcctcatgggaaggcaatagactgcatggtctgttctgtgtccccagtgatggaatcttgaggaagccttgtgtccctgcactgggggtccgtctgtccagtggggtgacatctgcagctcacggtcgtaattgaacacctcttgtgggtctggtagtgtaccggggttagaaagagaaaaacgcccataattacatgagaatgaggtgtctcatgagtgttaacaagccagtctgtgaagtgatcagttctgcctgttgggctcagtgaaagcttcagagaagatagatgctggaggtacatctggaaggaccaggtgggacatttccaggttgagactggtgggagaaaaacgggatggcgggtggaaggatgaggtggcacagcgaagagtcttccggaggggcctcctgtcagctctctgggaggcgggagagctaagattggaggggctggctgagagcggcctttggtgccccacgaaggcatgttctgagcaggggtagctggaggagggacgtggattcgttgatcaccatctgcatgctgtgcccacctgttgtcactgtgtttcctggtgactgacttagcatcttacatcttttgtttgcaggcttgtgagtggcaattccattgaagagaaattgttgaaaaatggaactaaagatactgaaccgagaagtggctgctcagggaaatgannnnnnnnnnnnnnnnnnnnnnnnnnnnnnnnnnnnnnnnnnnnnnnnnnnnnnnnnnnnnnnnnnnnnnnnnnnnnnnnnnnnnnntgaggtcagatgcacacttgggaccttgtactggggagtaacacacatctctgtgttcagcgaaccatccaggagctgtttgaagtttattctcccatggatgatgctggcttcccggtcaaagctgaggagtttgtggtgctttctcaggaaccttctgtcacggaaaccattgcacccaaaattgcaagacctttcatagaggtaagaatacattgaatctggctgaagagttgcacggtgggagccggcggaacacctgcaccctcccccagggttctgggtgctcagtccccactcttccctggcctgaagccctcttcccgtccctgcttttggaacctccccactcccttctttctgtcatggggattttgaactgtaaatacaagtgaggggaatggtggcgaaggtcgcggaccacaggcctgtcaccgaagcagtcgctgccgtcttcatctgcactttgccacagtctcagctccttcccctccccatggaaatctatccctgcctcctctggaggctctgcgggcactacccctactcccctctagctggctgtgttggcttctccctgagcagtgcagccatgagtctgcactcaggtgctgagtgtaaggtgctggttgattgcaaagactgagtataagaaagaacacagactatcacgttgatacttttgagtgttgactacatgttgaagtgataatattttggctatcgggttatgtcaatattttactgtttcggtgtgggtagtagaagatagagggcatgtttgggtcctttgatttttcccttttgggggtgctgctgtgtagacatgtcacagacccgtcacggggccgctgttccctccctgtccccgtggcttgcccgccaaagccctgcagccccacgtcctggagatggaggccttcagctgcctttgttctctgagtcccctcctccttcatgtggccctgccactcctccagaacttgttgtggggtccccgtttctgtgcctcttaccttggaaggatttggtatccctgtacatctttcttcctgccctgtttgactgcagcgcatgactgcatgggcttctctgtatgttttttcttttctgtgaaagtgttaaagaccagaccaggcacactacacagcccctcagcacctgtccgccgacacccgagattgagcctcccagcctcatggtgtcagccccctccttgcctgtgctcagcttgttcttaccaactctggtgctgtctcctcttccatttctaaacattactcagttactgaataagtaagaaatacttggggtatgactctcttagtctgtctgtgttgctgtaaaggaatacctgagactgggtgatttattttaaaaaggggtttatttcgctggtgattctgatggcagcagagttcaggattgagcatctgtctggtgagggcctcagacggcttccatggtggtggaaggggaggggggagctgcatgtgcaggccacggagtgagagagggagcaaggggcaggcagcaggctccctttaatagactggccctcacaggacgaacagggtgagacccactcccccagccccagagcgtttctattcctgagggatccacccgtgacccaaacctttgagaatttataatgaaaagccagtctcctgccctgcccccaaccccgccaccaccccgtttctcacatttcttctagagattgcatgtgtatcatttcctttgcacagaaataccttacagattattacatatgaggaggtatggatcaacctcattgtgttttaaggaggtaatacatgcatgaggttgaaaaagaaaaacaacacaaaagcgtagctggggccaggtgtggtggctcaggcctgtaatcccagtactttgggaagccgaggctggaggatggcttgaggccaggagttcaagactggcatgggcatcatagtgggaccccatctctacaagaagaattttgaaaactaggagtgtggtggtgagcacctgtagtcccagctactggggtggctgaggcgggaggatcacttaagcccaggagattgaggctgctgtgagctgtgatcgtgccactgcactccaacctgggtgacagagtgacaccctgtctcaaagataaaatatgcaaaggacctgactctgcatgtctcaaaggaaaacatgtaagtggccgatgtgtagacgaaataatgtccagcatcactaatcatcaggaaaatcaaataaaaaccacaggaggtaccaactggcacctattgggatgactgtcatcaaaacgcaaaagatagcgagtgttggcgaggacatggaggaaaggggcccgttgcactctgtccctgggaacgtcgttggcacagccaccatgggagacggcagggaggttcctcaaaaatgtggaaatagagctcccacctgatccagcaatcccactgctgggtgtatatccaaagagttgaaattagcgtgtaggagaggcgtctgtaccctcgtgttcatcgcagcactgtcccagcagccaggacatggaatcaacccaagtgtccatcagaagtctgtggattttccatattggctgtgttgtttcccagcagcatagtatttcaacacacagattcttttgaaacatacttgttgattgtcttactgtgtgtcaggcactgttataagcagtggggatacagggtcgaaaaaagacaaaaatttcatgaagcttttattctagtaaggagagaggcagaaaccaaacctagtgagtaaagcaygtaatttattcacatgagaagttgtgaagtgctgaatccaggggagaatgtggtcaccacagcagacaggttagtgtggctgagggggtggggagggtgtgaccaggtgaggcctgactgtagggagcccttggaagggtttgagtcaagctgtggcacggggtctggcatcacctaagagagtckctctgactcctttgttgagactcagttgtagcaaggcaagggggatcctggggaccagttaagagtcccagagcagtaacactggtgagcaaggctggtgaggacaactgggggacatgtgggggcagcaggcgggtctttggaggacagagccagcaggacttgctgcagtgggtgtgtgaggaggatggctgctcctcactggcttgaccggcccctggggacagagaggtaggttagccttggccttttgccagcggagacagatccacgttagcgtgctgtactcgtacctgccgcatgggactgtggctataggattcttctgtcattggcaacgctcatcagaggatttgtgcctgcaaaatggttttaagaaaagtccttgttgacatgcaaaaacaaaacatacagcaagtgtacacattacaaagattccagctggagaaatgttcagtcagtagaagcacctggtagccagcatctggtggaggaggaggatgcggcgggctcctcagaaggcctgtcccccagcggtgctgcctcttgcgaattctgacagcaccgcctgcttctgcactttccatacgtggagcctcttccttcgggtctgccttcttgtgcgtagcagtctgtaactcgttctcattgctgtctagagttctgtctgaatataccgccgtttatcagatctgcagcttgtggacgtgatggagtggttcatttgaattgtgctcctgtggatatttgtatccttgtcttttggtaagcacgtatgtgcaattcaggctgcttatgtttgatttcaggagatgctgtggctgtgccggggatgctcctgccatggggttgttctgggtggtggtgtggaggcaaaattgctggtcctttcactgtagctgcagggcagaatgtgggatagtctcattgtggtttaatttgtggttttgctgttgactgatgagtttgagtgcctcttcatatatttactggcagtttgagtactttttaaagaaatgccaaggcttttcccaattttttttaaattggattttctctatttctttttttttctttttcttttttttttttttaagacggagtcccactcatcgtccaggctgcagtgcagtggtgtgatctcagctcactgcaacctccacctcccaggtcaaagtgatcctccagctcagcttcccaagtagctggaattacaggtgcatgccaccacgcctggctaatttttatatttttaatagagacgtggtttctccatgttggccaggctggtcttgaacctctgacctcaggtgatctgcccgccttggccttccaaagtgctgtgattataggcatgagccaccgtgcccggccagttgtctctgtttcttaatgacttgttggagttctttatgtatcccgataaaaggcctttgtttgatacacttgacatatctttcccattctgtggtttgcctttttaaacgctgtgtattgatgagcagaagttctgagttctaacaccatccagggcccacatctgccgtctttatagtgggtgctttttgtgctctgctgaggagattactctgcccacctgaaggtcaccgggcatcctcctctattttcttctacatgttgcattgttttatgtttgctatttaggtgcaccacctatctggcaataagttctgtgtatcgtgtcraagtagtgttatatcactttgagggttttgccagattgccctggaaacagattgtaccagtttttaatttgtatcttctaactaaaaaccatacctccatgtcagatrtcttttgcccacatctgctagtaactatagatgtgtgttcctagctgtttcagcagatgaacagtggcatctcgtcattctaacttgtgtatcttgcactgtggtaaagctgtcttgtatgttcatagtcatccatgctacatttcgcggtggacttgctccggctgctgtaacgttgggctgtccgtctgctgtctgtttcctggacagcagcctctgtcctgctgtgtctgtcaggagctgtgggcagtggtgtgcatcgggtctgagatggagcctccttgggcctttcttgttctccaagcttccttggccctgggtgccctggcacgctttgcctgcatcagtgctcagctcttccatggggcctgcctgtccaactcgatagtaaggttagcaaggcccaggaggtttcccactcattttctgtattccctaagtgccttatcattttcacctgtaagaggacctcagggaaggagtggattacctttatggagagtgggtgattatagtggaggcatctccattaactttacatgggatagctctttttcaaactaccctcatttaaaaagtctatcaaggcaatctaaacatagactttcctcaggccctcaagagtattgagtatctggaggaggatgcccagaagtccgcacaggagggggtgctgggaccacacactgatgctctgtcatcagactctgagaacatgccgtgtgatgaagaaccatcccaattagaggagctagctgacttcatggagcaggtttgggcatgttttcctttacaactacatattttaaaaatttgacgcttctataaaatatttattgtttactgcaagaaaaatcactttttgattcaaatgttggttagtggattgtataaggaacttgacttttattaacttgctattaaccctattcaaaaaatatacttttggaacagcttacaccaattgaaaaatatgctttaaattacctggaattattccatacttctattgagcaagaaaaggagagaaacagtgaggtaagagaatcaacttttggtcagtgaaaaaaatttgcaatattttcagagttaagtttgatttgaagtaaatgtgacttcattaaattaaagtcacaaaagccaaaacccacaagtatggaaatgaacttaaaatgaagagagtctcgagaagcccgtagggaccgtggagcttgttcacccccacgtagggaccatggggcttgttctcccctcgtagggaccgtggagcttgttctacccctgtagggaccatggggcttgttctgccctcgatgtctttgactggatttgcagcaggctgctgcttgtgggggtgatgcattgtggagcagtgtgtgtagagaacatgtggctctgagacaacagggaaacctggagcagggactcgggggctgctctgagctgcactcctgatcctgaaagttcttgctgctctccccgtcaggacgcagtgatgactgcagtgagggcatgggagttctggaacctgaagaccctgcaggagagggaggcccggctgcggctggagcaggaggaggcggagctcctgacctacacgcgagaggatgcctacagcatggtacccggcccggggccctcctgccctcttgcccccctgctgaggggcacttgtgcagccatgtttggcttgttcaaagtctgtgtacattgacatgagaaaatgcctaggaatttttacttctcatatcaacacaacctcacttatgttctaaaaacacaattttcttaaaaattgacacttggagattgtcagttagatattgaccagctctgattaaaacatttataagtcttataaatagtcatgttgatcagaacttatttgaaagacttaatgagtatgaaggtacatgatttgtggcttataacatgacactgagacttggtggaagtcagagcttgccgtgttccctacaggagtatgtctacgaagatgtcgatgggcagacagaagtcatgccggtgagtgctgccctctccctttgtgtctgtgtgggcagcttcctgtgagttccacatctcatgggccttcccttctccatgcagctctggaccccacccaccccgccgcaggacgacagcgacatctacctcgactcggtcatgtgtctcatgtatgaagccactcccatcccagaggctaagctgccccctgtgtacgtgaggaaggagcggaagcgacacaaaacagacccctcaggtgcgcatcccgagggcgtcacatgacctgggggggccctggcctgcagaatccctgcatgtcagccactttctgctgtctgcctgtctgctgtctgcctgtctgctgcagggctagcgatcacacgcccatccgctgcctctcaggccaygtgcacaggttatgttgtttccagtgaggaaaccttcgtgtttcattctaattgaccatgaaggcccgaaagcaggtctgtctttggcaggtgctttctgtggcctctttgcccaggcacctccagacttgcctgacctgtttcctttgtcttttgcctgcccgtgtggaatctcctggtttactctcttgctgaagactgcctctctgttcagctgcaggcaggaagaagaagcagcgtcacggggaggcggtcgtccctcctcggtccctgtttgaccgcgcaacaccaggacttctgaaaattcgcagagagggcaaggagcagaagaagaatattctgctgaagcagcaggtgccattcgccaagcccctgccaacttttgccaaacccacagctgagcctggtcaagacaaccccgagtggctcatcagtgaggactgggcgctgctgcaggtaggtgggcgtggtctttgtgccagcggtcatgtgcggtcatttttctaacgcacgtccgtgcatccagctcactgtgatcactttgcagggagtctttggcaagagggaagaccttctgacttagagtgtattcacctgttttacctgaaatctccttctctaggctgtaaagcagttactggagctgcctttgaacctcacaatcgtgtcacctgctcacacacctaattgggatcttgtcagtgacgttgttaactcctgtagccgaatctaccgctcttccaaacagtgccggaatcgctacgagaatgtcatcattccacgagaggaggggaaggtaagcacggtctcgtttgtccttcgaggagagcacaggcaggtgtggtggccgtggcctgcagtttcagctccagtcctgctcttcactgactgggctccttcatccctgtgggtctgcggtgaagtccatctccttgggctcctggtggacccagcgaggtcaggtgtctgcactgtgcctcgcctatggcatgagcagtgatggaggagttcacgttgtgcttgttgggatcatgcttggtgttggcagcaggcctcgtacctgatgttttatctgataccaacatttgcactgccgttgtcatttctaagataatgagggtgtcatctgaatacttggccatatatatatacattttcaagaacgttttggatgaatgaaaagacctctcgcttggttttgatcatggcgtacttaaatgagggtgtcatccaaacacttggtcatatatagatagacattttcaagaaggttttgggtgaatgaaaagataagttgataagctgtctcgctttgttttgatcgtggcgtacttaaagaaaagtctgttactggtacctctgctattctggtaccgaaagactggctggctgcaatggtttgacaagcataatattctctgtttcagggttaactataagtattgcaaatgtttatttacgtgtagtgtagtcaaatcattggtctttcatgtaagaagtcagctgtgtggtttgtagcttgacccccgaagagtccaggcggctggtcagtaacatacaggcatgcgtgtggcatgccttccctcgagctgagtcatccctctctgttctgcatctggctttcttcaggcagctccttcttgctgcttgcctgcctttctcgcctcaggacagcatccagagcccccacaccagcagcgtctgcatgctctactgtgcccacgttgccagtgtccacacccattgggaggtgtgctgcctgacttccagggcacgtgccatgctggcgtgtggggaccaccgcctttcagttcacctcatggagcccatccaaacaggagctgtgggcacatcttcttgcatggaacagggtgggacacatatagtagaggcaggcatccagtacttttattgtatttacttttgttcctaatttgtgagaattaacattttctccatagtagccagatccatcctcaggatgcgaacatcacacttaatttatttctgtacccactctttcagtcatctgtcttttcatttttctaaaaacacttgtctcaaagcatttgtttgttttttttgttaaatgtagaaaagcaagttttcttcgtaataccactttgtggtcccttcaccaataagacttcctggaatcttgcattaattaggttttctgtgttttggaagcatttataataatagccattaccttattatggaaaaaaaattaaagctaaaatattgtattgggggaacctgcccccgatagtcacgtaggttcttttctattttccctaagtgttggccggtctgagaagtaaagggaaagagtacaaaaaagagaaattttaaagctgggtgtctgggggagacatcacatgtcggcaggttccgtgatgccccctgagcagtaaaaccagcaagcttttatgagtgatttcaaaaggggagggagtgtatgaatagggtgtgggtcacagagatcacatgcttcacaaggtaatagaatatcacaaggtaaatggaggcagggcgagatcacaggaccacaggaccagggcgaaattaaaattgttaatgaagtttcgggcaggcactgtcattgataacatcttatcaggaaacagggtttgagagcagacaaccagtctgaccaaaatttattaggcaggaatttcctcatcctgataagcctgggagggctacaggagactggggcttatttcatccctacagctgtgaccgtaaaagacagctgcccccaaagcggccatttcagaggcctaccctcagagacgcattctctttctcaggatgttccttgctgagaaaaagaattcaacgaattcagcaatatttctcscatttgcttttgaaagaagagaaatacggctctgttccgcctggctcaccggcagtcagagtttaaggttatctctcttgttccctgaacattgctgttattctgttctttttttgaggtgcccagatttcatattgttcaaacacacatgctctacaaacaatttgtgcagttaacaaaatcatcacagggtcctgaggcgacatacatccccctcagcttacaaagatgatgggattaagagattaaagacaggcctaggaaatcacaagggtattgactggggaagtgataagtgtccatgaaatcttcacaatttatgtttagagattgcagtaaagacaggcgtaagaaattataaaagtattaatttggggaactagtaaatgtccatgaaatattcacaatccacgttcttctgccatggcttcggccagtccctctgttcggggtccctgacttcctgcaacaatattgtcttcttttatagctgatttatgaagctaatccaaagaaaaaggcaaaaatatttgtaaagtttgagagtgatttttttttttttttttttttagacgggaatttcactgttgtcacctaggctggagtgcagtggcacgatctcggctcactgcaacctctgcctctcaggttcaagtgattctcctgcctcagcctcccgagtagctgggattacaggtgcatgccaccatacccagctaatttttgtatttttagtagaggcatgtcctctactgctagaggaatgccctaaatttcaccaggttggccaggctagtctcgatctcctgacctcagataatctacccacctcggcctcccaaagtgttgggattacaggcatgaaccaccagccctggctgtgggtgatgttctgaataagttggagcactttgttaagagcctgtgcacagaaacatagagtaagattcagtcttaacctgtattttaggaatcaacagaaacctgagacctagaattttctccagggcctctcattctgtacatagaggacatgcctctttgcattagaggaccccatggtgacttgccgagccccctaaaggacatcctgagcctccatgaccctcactccctgtggaagcccatgatagtgacagtggtcggatgtgtgcgtgagtgggacagccccacctctcaaagcctgcgggggctccagcaagccatgcggggcggggcattcatgcctggttagagcctgcacaggagttccattaccagacacacggtctttccatctctgacttggctcagttgagccatccagtgtcatgtgtgataggcctggtattagtcttatgcaccccttctccctgcttccctttgcttactcttaggataataggtaggaggagaatgcttccctgtatggtacagtgttccggaagcagactgctgtggccttgcatgttggtttctagttctggttgtccttggtgttgccttcagaatttaaggcattcctctagcagtggaggacacatgtgcacacagacatgtatacatgtacctgcacagacacacccatacctgggcctgtgctgctgtgtcatgtgagagtcttggttttcgccttggcacactctctttgaccagggtttagaggagcatgggggaagagccctgggtgaggaaggaggtgcttgagccctggtcttgacttgtcgctacctctgtgaccttgcacagacagcattcctgggacagctgttcacttcacaggataaggagttgctttaaaattctgcaggattctaagatgtcttgggagcacatagcccacaattgagtggcccattgtttagctgtgccatttatgaaggaaagactgccagccataagcactgctagagaccccaagaatgtactttgagacaccactgggcatgcgccagcctcactgtccaccgtgggcagatgacagtgttgtccgtggcagtccgcgctgccccttggtgttagcgggtgaaggctcacagcccgctccacacagtcacctgccatgtgaccttgggcactttgcacacctgttttgttccctctccctcttggggtgattatggggcttacgtgagagaacacctggaaaggattagcatggactggagagtgtcacagcagtcggccgcgacagccacttaatgccgctgctgttgggttatgcctgaacttggaaagaaggcccaggaaaaggaagtttgtgttcagccatggggagtttagcctcagattcccacccagtgagccctgtgtcccacgcagccgtctgtccatgctgcctaattcagatgcactctcgtcaatttcattgcagagtaaaaacaaccgtcctctccgtacgagccagatctatgcccaggatgagaatgccacacacacccagctgtacacgagccactttgacttaatgaaaatgactgctggcaagaggagtcccccaatcaaacctctgtatgtttcctgagtgctcattttatgttcattatgactgagtagattgcgtgaagcttggttttgatgtgtttttaacatacccttcttcagatatttcctttatttaataattgctgtctcactgtctatacttcaggcttggcatgaatccctttcagaagaaccccaagcacgcgtctgtgttggcagaaaggtatttctctattcgtgacacatttgttactgtttggaaggatttcattccagtgtcatctaagttcagtgagttcagcaaatcgttgtgcacttagcgtgttcaggcatcagctggacgtggcagtgcgcagaacctgcaggagagaggtgcttttcctgccgtgggctagggtatgcataggacggcccctgccctgtctctgtgttacagggattgtccttgctggccctcagtggggaaagacgctgacagatgtgatgagtgtgccagggccatgtggccaaccacaaggggctttcttcctcacaccccacctctcaggcactgattttgttcgccatatcttaagaacacaccacatttaggggtgtgtgtacctgccctgaagttatacaggggaaaagaggaatgaatgaatggatgggtacagaagtgggtagatgcaagaaagtaaatggggtaatggatggtggaaccccagtgtggaaccttactgccaggcacatgggtgtctgtagcgtttctgactgtcggactctttccataaaatgttggaaaggaggtctgctgggatgaaatgatgtgcatctggtttaggcactgttgtctgtaggctccaaccctacagggtcggtgggtttctccccgtgtgcggagacgagagagcgtagaaataaagacacaagacagagataaaagacagctgggactgggggaccactactaccaagacatggagaccagtagtggccccaaatgccaggctgcactgatatttattggatacaagactcaggcaggacaaggagtgtgagccatctccagtgataggtaaggccacgtggatcacatggccactggacagggggcccttccctgcctggcagccgaggtagagagagaaggagagaaacatcttacattattatttctgcttatcggagacttttagtactttcactaatttgctgctgctaactaaacggcagagccaggtgtacaagatggaacatgaaggcagactaggagtgtgaccactgaagcacagcatcacagggagacggttaggcctccggataactgcgggcgggcctgactaatgtcaggccctccacaagaggtggaggagtagagttttctctaaactcccctggggaaagggagactccctttcccggtccactaagtagtgggtgtttttccttgacactaatgctactgctagaccacggtccgcttggcagtgggtgtcttcccagacgctggcgttaccgctagacccaggagccctctggtggccctgtccgggcataacagaaggcttgcacgcttgtcttctggtcacttctcactgtgtcctctcagctcctatctctgtatggcctggcttttcctaggttatgattatagagcgaggattattataatattggaataaagagtaattgctaccaactaatgattaatgatattcatagataatcatatctaagatctatatctggtataactattcttgttttatattttattatactggaacagctcgtgtccttggtctcttgcctcggcacctgagtggcttgccgcccacagttgtcacacagtggcggatttgggaggcttcctcgttctgtggccccctttccgcacagtagtggagtgatccttgtcagaaggagttggctcagggcccatctccgcaaacccccaggactccctactgcccacgctctgagtcgcctggccctggctttcagccccttggtgctccctgagtgtgctggcagccgcgccccagcccttcacttaactgccctcgtgagatgttttcagagcgcactgttgagaattgcagccccgccctgctgttttcctccatagcagccagtacgtcttcagacccactgcacattttacctgtttgtcgtctgatgtgagtgctgtgatcgctgggactctagcgtctgggagcacagacccatcatttgattgatgttgtcgattaaatgaagagttaattcaccctactaatatttatggaccgcrggcctgcgcggcgtggagcctgggcattctcgggggagcgagagaggcacagtcccgccctccctttacctccctggagaggaactcgagggcatcctcacagaaggaacagacagagattttcccaagtacagtgcagacacatgaggtgggctgtgcgtttgggggctgccacaagtacgctggggacgtgttcggagatacttttcctggagagtgggagagctcggcctcaaggaagaggactcagcgccaggctgaggatgaggtctaggtggctcgatctcctgcagggcacattgggcaccttgctttacgccctcrtctcttgggctggagctgccccagcacctggcagcatggtgtttctagggtacgtggtacttgtctgtcttaaaacttgcctgtatgtttttaacctttgcgtctgtctttcagtggaatcaactatgacaagccgctgcctcccatccaggtggcatctctccgtgcagagcgaatcgcaaaagagaaaaaggtcagcgccctgggcccttctgcttgagtgggaaaatgtggtgactgtgacttcatccagggggtatgcaggccgagtctgcccctccagtggctcctcttccttcctggcccctcaggctctggctgatcagcagaaggcacagcagccggccgtggcccagccacccccgccccagccgcagcccccaccacccccgcagcagccaccgccaccgctgccacaaccacaggcagcgggcagccagccgccagcagggccaccagctgtccagccccaaccccagccacagccccagacccagccacagcctgtgcaggccccagcgaaggcgcagcccgcaatcacgacggggggcagtgcagccgtactggtgagcaggggcctcctcccgggcttcccctctacgggaagtcacccacacctgcacttgattcaagtgctttctgttgaaacgaagacttgttgccagttctagcacatttccagcttgtagaccttcctctgaagaaatgggaaaaggcttagtctcatacccagaggaattgtgtgttttcacctggattctgccatttctctcctccagggcttttgtgggcttagtggctttattggatttggcaggtagaggcagctccttttagtggaggtggttgggaagtttgtaattgcctgggttttgtaaaacatacctgtgacgcattcacttcctgacttcctacacacttagagagcaggtactgcctgtgtcggtgtctcaaagcatgcccatgtgtgctcccccacacaggtcagtctttaatgcctgttgtagaaaagctgtaaagcacacaagaagcattgtgaaaagaaaggcagggtgcggagctgcggactgtggccatgcacaccacgctctggtgtatctctgtactgtgtgcgtccgtgtgccacacagacgctgaaatcatatgcgcagaatcacacctgcagagaataggagctgtgcyaaattggggaaacccacactttggactaccaggcaggcataaaaatatttttgttacatagaaccatttcctgcagtagtttttagaaaattgtttgctgtagtggaatttttatatgtactcaggcaacttcattcctcatttattcaaaagggatctttgtgaatacttacttggtgcaaggtgggcaagatgggcagtgcccacattctggagccacgtcctacaggggagggaggcagccaaagggatcattttaaatgctggcgggaggagtcagggtggcacaatgcaggactggcttgttaggaaacacctttctgaggacttggcatttgagctaaggcctgaatgacaaggagttggtcataagaagaacaaaacagcaagtacagaggccctgagcttggctgatatgggggccagaaagctcagtgtggctggactcaggtggtgagggacagagggtggatgaatggagtggagggacggaggagtggagggacagtggggtgagggtggagggacagtgggatggagggtccctggggtggagggacaatgggataggggtggagggacagcaggtagacagagggtgggggcaccgccaggtggaatgagctggggaggatgggacaggtggctgtgtgaatgtcgtggagtttggatttgattctgaatgaagtggaarcctttggaggatttatgcaggggagagcctgacgtgaaattcaaatggattttttttttttaaataggcaggaaccattaaaacatcagttactgggacgagcatgcccactggtaagacaaatacagagatgctgaaatgtggaccccatttctcctggcgctgttgccttatgcccgcctgtctccgcaggtgccgtgagtggaaatgtgatcgtgaacaccatcgcaggggtcccagctgccaccttccagtccatcaacaagcgcctggcgtcgccagtggctcctggggccttgactgtgagttgcgcttcacctgggttgtgcaccttgactgcattctgccgaaattatttgcttgtctgttaattcttcttcttctttttaagtattccattggtgaaaaactgtctagtttgaatttcataaaataagtagctgatcagtatgttgatttcagaaacattcagctgtttaggggatggtttccattctgtatgagggatgaaaatgaggtggggtatgtgtgtgtgtgtgtggtgtaggggtgtgtgtgtgtgtgtgtgaggtgtaggggtgtgtgtgaggtgtaggtgtgtgtgtgtgaggtgtaggggtgtgtgtgaggtgtaggggttgtgtgtgtgaggtgtaggggtgtgtgtgaggtgtaggggtatgtgtggtataggggtgtgtgtgaggtgtaggggttgtgtgtgtgaggtgtaggggtgtgtgtgaggtgtaggggtatgtgtgtgaggtgtaggggggcgtgtgtgaagtgtaggggtgtgtgtgtgtgtgaagtgtaggggtgtgtgtgtgcaagtgtaggagggtatgtgtgtgtgtgtgtgtgaactgtcccctccctgtaggatgattttagataggaggtaggcgggatgtgagggtccgctgctgattctattgccgcaggtgccccccatgtgcttgtcactgtgcccatgtggggaagctaagagatgacagccctcttgggggcgtggttttgggggaggggacacggcatcacacgagggcatggctgggtgtgtgcaaggagcaggtgggcatgggaggagcgggcagtttctacggaacgtggagaccccaggtgtgggaagcggtaggtgcagcccacccaggtggagaggaggcacctaggcaaaggtgcagagccatgtggtgccctgggaccacctgcttctcttgggtgtttcatcatcagaaccaaacacaagtgagaataaggagctcagatttgtatctcgattttccaaatagttcacagacccaggggcaacataccctgaatgagaagaaacgatgcttcaaagtcagtgctttggcaagtagaatgtagtctctcttgggttttgaaaagcatctttcctgtgaagatgtcgttgctgtagtagcctagatgatggagcattggcaggatagatgtgtagatgatggaattggatagagagtccagaaatagacccctccccaacacaacacacgcacacacacacacacacacacattttcagttgacctcagtaaaagtgccaagggaattcagtggtgaacagactgtcttgtcagcaaacggtgctgtaacagttgggcagccatgtgcaaaacaatgagccttggcccgtaactcacacggagtatgaaaggcactccaggtggatcacaggcctgcatgtaaaagcaaaaactacactgtaagccaaaacagtagcatttctaggagaaaatctgtgctactttggtttaggcagagatttcttaggataccagaagcctgtgaatcctgaagaaaagttaatacgttaggcgtcatcaaaattaaggacttctgctccttgagaaatagtaagaaaacgaaaagcatagactgggagaaaatataaagattcttcaactcagtagtaagaaaacaagcaactgtataaaatgggcagaagatgcagcagtcacttcaccaagaagctagaagaataacagataaatacctgaaaaggtgtgcaacgccatgagtcatcaggggaatgcagatttttacaaccacagtgatacaccaccatgtgcctgggagagtggcttcagaaacagaaggctggcagtcatggaagcagcgaggaccctctcacaaggttgtgggaatgcagagtccacagtcgcttcctaaaacagtttcttataaaaccaagcctactcttaccatgcagcttcgcagttctgctgctaggtacttccccaagagaagtgaaaacgccagaacaagaaccctcaacaccaatgtttatagtggctttattcaggattgctcaaaaagaaaacagcctaaatgcccttcagctggtgaatgggctgataaaccatggtacattcatacagcccagtcctaccaagcaatacaaaagaatgaatgcccgagacatacatctccatggaggactctcagatgcattttgcagctaagtgaacagtttcagaaagcttcatatgctgtatgactccgtttcaataacagaaaacagatgaatgattgccagrtgcgggaggggctccactacggagaggaattcgagaacgttgggagtggtggggtcatggcagtagctacgtgatgataatgtgtccgtcaggaattcgtagaaccatatattgtactctgtaaattacccttcaataaatccctctaaaacactcttaagcagtagaatatatatacacacagtttttctagtatgtgactttaagattatttcacttttctttctgctttgcagtaaacaacttcaggctctgtcactgcagtagatagcagaagctgttaggcctgaggcgtttggaacatcccgtatgaccaataccactgtttctatgagggtaccaagccagaatcactgcatttagcgttttattttgaaaaagacctgttctttgtggtattttaaaatgtaaagcatttcattcacgacatatttttgagtggctcttaatggacaagacattcttcctggcactgtgggcccaagacacagtgtgctttcatgggggccttgtagtgctgtggctggaacatgagagaggtgcagatagcagtggtggacatgtgtgattgtactcgggggactcagagaaggctttcaggagaaagtgatgttgggcttcaggaggacaggaagtacgtcatccacagaactggcccttctgaatgcagggccagtcttgtgagcggagggtctgaggggaagggaatggcgtgcatggagaatggcatgttgttctgtttgaatggaacacaaaagatattaacagagaaacagtggttccctgcctttaaaaagtttttattgagtggcttctgtgtgcttggcactttgtaatattgaggctagattgtactgggctttggatattgggctaaagattggatttttttttttttttttttgagacagagtctctccctgtcacccaggctaaagtgcagtggkgcgatctcggctcactgcaacctccgcctcctgggttcaggttattctgcctcagcctcctgagtagctgggattacaggtgcccgccaccgtacctggctaatttttgtatttttggtagagacggggtttcaccatcttggcctggctggtcttgaactcctgatctcgtgatccacccacctcagcctcccaaagtgctggggttacaggcgtgagccaccgcgcccagcctagactatggattttattcaccaggcagtggggagcccttaacggtcttagagcagagagaagttctaggaaaattaacgtgctcctacgtatgtagaattgattagagtagaagaggctaaggagaaaaacgatttcttcctttttttttttttttgcgacagcatcttgctgttgctctggctggagtgcaggggtacaatcacagctcactgcagcctcacactcacaggctgaagcaatcctcccacctcagcttcctgaatagttgggatgcgaaaactgtttaaggagtccagaaaaggatgacttctgtttctggtaacaagatgagttaagttatttttataccacctcttaatgaaaagaactgaagttattggataaaaatttttaaagcttcaaggaattgacaagaataattaattatcaggcccaaatctaagggagggaagaaactcagagaaagaaataggattcactgaagtcatgtttgccttgaaaataaatttcagcttgtggaatgagggaacttgaattcaagtccaaggctgggccaaggtggagaatctaaaaaggaaactattgatacaccgaggtagggccccaggtggctaaacctttagagcaggagtgaaccagaagcagaatccatctgcccttggccttcaggggtcaaaagaagagtagcccttggattgagtagtggagcatggtggggacggcccccgagaggttgaaaccacagggtagtttgcagctcaagtcgatattaccttaaaagtgtctcccgcactccctcacatcaagtgaagtctacctgcttcagtgggcatgttcctgggcagctgacctggagcaaatgcagattctctctggaggattgtgctttcttgacttctgagaatctccacaaatagttttctagtataatacagtacaatacaatagaatacaaaataactaaacagagaagagaaggcattatgagtgagaatcagcggaatgacagacactggataggcctgtaaagatgtgcgatattgggattatcaggtttagattttaaaggttaggctttcaggctgggcgtggtgtctcaacgcctgtaatcccagcatcttgggaggccaaggcgggcggatcacgaggtcaggagataagagaccattctggctaacacggtgaaaccccgtgtctacagaaaatacaaaaaaaaaaaaatcagccaggtgtggtggcacgcgtgtgtagtcccagctactcgggaggctgaggcaggagaattgcttgaacccgggaggcggaggttgcagtgagccaaratcacaccattgctctccagcctgggtgacagagcgagactccgttaaaaaaaaaaaaaagttatgctttctattttaaggaaatagaagattgagagtatctgaatatctgtaagcaggaaaytatgtttagaaagtatatagagaacttttagaaaagtctgattaccaaaaytgggggaaacaacccaaacttaagaatgggcttaatatcacacaattgaggagaaaatgagggaagtggaggcaaaaatcagaagacatcctacacacaacatgggatgacaagatgacacatggaggacatggtgacagggcctgataggtagtcactgactatcagacagaaaattgagcagagtcaatatttgaagacagaatagtttttgagaacttactaatgacactgatgcgtatatgtagaaagtctaatcccagtcaaggatgagaaaaaggaaccacgtctgcataatgctagtgaccaagaggtctttcaagcagccataggaaaagacagattgccttcagaggtggagcggctcacttgtcagcagcagcagtgaggccgggagccagcgggggtcgttgtcgtgccagggaaagaaagttgctgccagcctagggctctgcatctcttggagatatcttaaagaacaagggaggccgggtgtggtggcccacacctataatcccagcactttgggaggccgaggcgggcagatctgaggttgggagttccagaccagcctgaccaacatggagaaaccccatctctaccaaaattacaaaattagctgggcgtggtggcacatgcctgtaatgccagctattcaggaggctgaggcaggagaattgcttgaacctgggaggcagaggttgcggtgagccaagattgcgccattgcagtgcagcctgggcaacgagagcaagactccgtctcaaaaaaaaaaaaaaacaaaaaacaaaacaaaacaaaaaaaaacaagggcaaaataaagacattttcaactttggaccttcactgaatgatatgctttaagcagaagaaaggtgttcccagctggaagtggtaacaaggtagactcatggatgaacgcaggagctcactggggttagaaagaggaaataaatacacaggacaataacatgcaagctggggaaggggcagaggggctgaaatgtgcacagatctcgttactgtttaggaaaagcatggagtatttagactttggcaagcatccgtggtaattccagaccagccaccagaagaatgagagcagagcgagttgctcccaactgtggcagggacattggtgaggaaagagtcatctgagaggaggcaaggaaggagatgaaaagaaacatacagcagctgggtggaatggaaaacatggagtaacacgctagatttccatccaaatgcgtaagcaatgagacataaaaggatcaagagaaactaaaaatacactgcacttcggaaccaagggagctggcagaggtcagctggagggacactgcagaggtggcatgattgcgtttgccttccagtttatggtgggacaaggaaggacggtgaggcaaggtgggatagggtgaggggaccactctggctgccacttctgcctgcgggccagagtggactgcagggcacagtgaggatgctctgaattttaggcaagatgaaggtaagatgccacaagaccccacgcacatggtgagacactcagggctgtagtttcagcacagatggggacagtggtagagagccaggactgtgggctgtgtgtttgtgggtagcatgggtgcctcaaggacagtcgttacgttcctggggaccaagaggtctttgtgcggagagggagggacaggacggcctttccagcatgtgcacgggcgtgccgccatctgaagcgtgtttctgtgggtgatgtgatctgctgggagaaaccattgctcagggcacttgcttgtgaatttacacatgaaatcagcagttttcaaaagactgaactctagcgtgtgtttcacttgtttcgcctctgaagttgggtgctcttgtcttccctgctctgagtgtgaacagccctgagtgctgtgtgaaatatttgatgaggtcctctgtttgccttttctagacgccgggaggctctgctcccgcccaggtggtgcacacccagcccccgccacgggcagtcggctccccagccacggcgacccctgacctggtgtccatggcaacgactcagggtgttcgagcggtcacttctgtgacagcctcggcygtggtcactaccaacctgaccccagtgcagaccccggcacggtctttggtgccccaagtgtcccaaggtaaagccaggctgggagctttctctgccacacgtctgctctggcgcgtgtgagggctcagctgctgcttgctgtctgagaatgaggatctgaaggtgggcgagtatccctgtccagacctaatgagcaaacctcttcatagccacaggagttcagctccctggaaaaaccatcacacctgcacatttccagcttctcaggcagcagcagcagcagcagcaacaavagcagcagcagcagcagcagcagcagcagcagcagcagcagcagcaacagcagcagcagcaacagacgacgacgacctctcaggtgcaagttccacagatccagggccaggcccagtccccagcacagatcaaagctgtgggcaagctgacgccggtgagcatttcccagaggaccatgaacgtgtgcgtcttgcggtcagtcagcccagcgtctgtgagacggtgcctgcttgcatggtgcagtccagagtgtattttgcaaacgtctagcactgcctttatgtaggacgcgtgcttcgttttattggtctaaaatttcccatgtcataacactttgatcatgccttagagaagtcttacagcttattcagagcactttggagacattaacacccagcgtgcaaatgcgtcttcttgcttaggcgtcttgtgccttgtgttcagcatcagtctctaggcccgcttggtgtggttctggaccagagaaagtgctggtgagaagatattcctcagcagtgttgggagagcaggcgatggaccctgggtttgtttcgatgtggttcacgtgcggtactgtttctcaaaggtggtcattggagtactgatgtacctgatttttgctaacctctgtaccagctttgctgttctttatgtaaatatattcattttcaaaggaaatgttgggccggacacagtggctcacgcctataatcccagcactttgggaggccaaggcgggcagagcatttaaggtcaggagttcgagaccagcctggtcaacatggcaaatccccgtctctactagaaatacaaaaattagccggacgtggtggcgggtgcctgtaatcccagctgaggcccaagaatcgcttgaacctggaaggcagaggttgcagtgagccgagattgtgccactgcactccagcctgggcaacagaacaagactgtgtctcaaaggaaaaaaaaaggaaatgttatgtcctaccataaatgaaaaatcattaatacttgtcatagaaagtaaccagagacacatacggaataaagacaagacaatattttgaagtttcagctcactgttgggcctgccggagtgcttgagtctgggcctctccgtggtctggaagggaggaagtgggctgcaggagacgcacactcagctgagggcccctcctggggctgtcgggagggctgtcggtggaatttagacattgagcttatcctgttcctgtcacaccagccatccctcgagggctgcatggccatatgtggctgtggctaccaccctgggcagcccccgcctagcccacttgtatcctgcgggacgtgccactggacagtgctgaattagaatgctgtgctcaagagtcccaggcccagcagaggcaactgtcagggagtcagagccgggctttgacccccccggcccacagccacacaggtaccttgtcacctgccccggttcaaccactgatgacccccccccggcccacagccacacaggtgccttgtcacctgccccggttcaaccactgatgaccccccggcctacagccacacaggtgccttgtcacctgccccggttcaaccactgagacaccagtgccgtcaacatcaaggctgccacccagccttggctgccaggagctctgtgtgccagctgtttgcctgtctccttcgttcctcactctgccctctcccaaatccatttcaaaaccagttcacttccagcatttcaaaagagacttgatagtcatgatcaactcagtataggttttcttaaaaaattttttcttaaaatgttttttgaacttcaaataagtttggttggtgctacagatttaaatcgacttgtttgtgaggataatagaattctttttgctatgaacttatcagtcagaatccgtgtttgtagttttcaccgacgaatgcacatttttaataaatgaacacctggaagatactgggcagcccatggaaggcggtctggatgctgcacggtagcaggtgtctgctttggtatttaatgggcagtagaggggtggcttaggaacaagatgtctacttaaagaatggagcacagttaatgttgaagagaagatactttgcttgtattttaggaacacctcatcaaaatgcagaagcagaaactgcagatgcccccgcagcccccaccgccacaggcccagtctgcgcccccgcagccaacagcccaagtgcaagtgcagacctcgcagccgccgcagcagcagagcccccagctcacgacggtcacggccccaaggcctggtgccctgctgacgggcaccaccgtggccaacctccaggtggcccggctcgtaagtgtcagtttctgtttgttttccaaaagcagcatctttttatgttttaacacagctgttgcgcttgctcaggtgcgtgtcacgtgttacaggagtgagtgtgagacgggttcttttccccgagaacttagtaccccttggacagaggacgggactcaccactcgtggaacattaacacagcagcagctcccagagcccatccaggcatcaccaagcttctcagggcttgaattgaggggggtggagagtgagcgaggtgagatgcagcctgcgtggcttccctgtgctgctgagggaccctgcagggaccaaggcctgtgtggctggagcagagggcgctgtgcatgtaagccgtaggcatgggcaggtggcggtctctgaagctgctctcaggtgaccgctgtaggcagggagagcatttggagatttcagaagggactagcatcaggcgcaagtgctgtctgggaagactggctctcagcaggtgccagcgtcccggggcaggcagcgtcactgcaccgtgactagagctcagctaggggtactggtgacagctgccctgttggaggctcaccctgagctagactttgcccttcgttctcttgtgtctttcacctggcccagtgctcatggactgccccaggcagggataagggtcttactattaattccattttacaggttaagaaactgaggcatgtaggctaagttcccacccaaatcccacaaccaatcagctgcaactcaagctaggatttggggacccaggtgctcaggctaagctgtgtgggtgctggacccccactttgggtcttccctgggaggggctagccctccacagcagagtgagtagaagtggataaaaaactacagaagggtgcttggtttcattcatgttcacaaaaatgcaaattcactgagaagggtggtaacacctagtggtagccagggtaccgggttcttgttggacaggaatcagtggcctctttttggagaggattttggtaattacgctatgaaaatgtgcacgcttatttaactaaacacccccttatgtcctgcagagataactgaacatttacaaagtgatgaatgtacaagcttgtttgcttcatgagtgttagaggaaattaaatgtccattactaagaatttcattaagtaaatgatgtatcatccaaacaatggaatattaagcaattttgaaagtggttttttgtaaagagaagagaaacagatttcaaaatatttataattcatgtcatttttgcacactttcacggtgagccacacagatatgaacagtggctgaaggctaaataccagttttaatattcagatatgagtagtttgaggagtgtgggtaatttttactttgtattttcttatgtaatcttagtctctatacatacaaaaatggaagtacttccatttaccattttttaaatggtaacttaagagaaaatgcgggacgggaggctgaggcagtcattttgaagtgagggacaggctgatgtcgagtgctcgctgaaggaacaggaagtgaaaagccttctgtgggaaaaacgggacaggatgcggttactggttcaggagatggagggaagtgaaggtgatgtcccgtgagatcactgacatctgaacgcagcagcatgtgtgatgagcctgcaggtcttgcgggagcttcagaagcgcgggctgacctgtgacttgacatttccctgcggcgtgcagatctctcagttttcctttcctgttgggccactttaaactttgttgatctttgtaaattttctcatggcatgacctcttgtggagaagtatttggaaagacataccgtgtcctgaatttctctggactctcccattatttctactgtttagacccgggttcccacttctcagctgcaggcgcaagggcagatgcagacccaggcaccccagccagcccaggtggccttggcgaagcctccggtggtgtccgtcccggcagctgtggtctcctcaccgggagtcaccaccctgcccatgaacgtcgcggggatcagcgtggcgatcggtcagccacagaaggcagcaggtgcccgccccagcacaccctcccgtcctgggcttgagcctggtttcacaggcctctctggtggcagtggtcgccagcgacccgtgttctttcctcacacccacccacttgagcgtgccatcacgtgttctagcacaaacgtgccttggcgctttccaggcgcaaggctgggtcctcaattgaactgttaacattctgaaatttccgtcttaatttaagtgtaatttgtgaacccagaaacattttaatgtagttaagggatggcttacttgtctccatagagtttcatagtttgttattttctgtagaggtgagtcagttggaacagagcttggcgtgagcctcaagctcttttcccagtgtgctgactaaggggcttttgctgcctgcaggacagaccgtggtggcccagcccgtgcacatgcagcagctgctgaagctgaagcagcaggccgtccagcagcagaaggccatccagccccaggctgcacagggcccggcagccgtccagcagaaggtaccggggctaggggattctcacttctgggtctatgccaagccaaagctggctgctggaggagagggtcctaagcagacaaatccccatgtggcggctcacgcttttcagagggtggcttcaagggctggaggtgctagtgtggtcatccctgttggtttttccttcctttaaaaggtgaatgctgtgtgtgatgtgacaagtgaggctgaggtcttggcagggggatggagggggtatagtctgtgaggatggctgggtgccaggtaagaagcctgcatggcattgggacagacacagggggtgcaattgcatgatgggggccagtgggctcagggaagcagacgcagctcacaccacaggacccgcctggactcctgctggaggacagggatgccgtacagtctggaccccagacagggaatgtggcctctgtgcatgttggtggtgaaaggggagataaacacgccagggcccgacgtggatgggggcgcagcagggcactgggctccaagggcgtctacagtctcagccagctccctgagacgatacctgtgcctctcagcagccagtgctgtgttgaaggacgtgagggggacacggtggtgagacagctctgcctccagggacttctgctcgtggtggctcatcggtggcacccagcccaagtcccgggcttcggatggctggtgtgggccctcagaccccacgttctgttggcactgctgtctggctagagctagaaggcgggctctgatgggaagccacatggctgtgtggggagctgccctgttccctgagcgctgtgctggacccctgcaggcacctggtgcttatcctcaagacggaggatgttgtcttgaggaaactgaggctcagagaaaaggacttgcccagatcacagggccagtaaaaggcagctggctgactccagcaggcccagggttctttgtgccacaccacctggacactggctgtgctgtgagccgctgctacctcctgcagaagaccagtgcccaggggccctatgggtgaagccctgctggtgtgcagcaatggcatgctctgtggggagctggaagcagagctgtcctttggaacccagagggagagggagtgagcactgaggggacacaaagccgggaggcgcagggtgtctgggtagtgccaccagctccgccgtggccgggttccaaagaccagcctgcatccccacttggcacgaccgctgcagggaagtgcatgtcctttgggtcgggatggtcacctgcatttatttacctctggaagaaggagacagtgctgggacttacctcctgggcctggtcagcagtccctgggtgcgtcatggtggtccatgggcagacgtggccatgctgatgcacaggtgggtgtggtccctcaggcttgagctgtgcttgagggagcagtggagggctgcagctgaagtgctgggctgtgtgttcctacgattggacaaaacatccttagatgttaaaaacccctatttacccataagcatggctgataaagcagatacgtaaacgtcagatgtacacaatatgatctgcaaaaatggtgcataccagtttgttaccccgtgtactaaatattttctttatgtctgccaagtttttacattggatttgagagattgtgatcgctttcagtcacctaagtagcagccccgtgcaggtgtgacaagggtgtcagggtgccccaccagcccgactattcagggagcagtgtcccgggtggggtgggctgcaggcaacggccaggcctcctggaggagaagctggcggccatgccgcatgggcagaggtaggcctggaggcagcggcagggatgggacagggggcaggagatgtgggtatgcacagggttggtctgggaggtaggctggaaaggggctgggttctgccatagggcccagagcgggcaggcgtcccgggagtcttgagcgcggcatggtctctgcggccctaatttcgcagtctctccccagatcaccgcacagcagatcaccacccctggcgcgcagcagaaggttgcctacgccgcgcagccggcccttaagacccagtttcttaccacacccatctcccaggcccagaaactggccggggcccagcaagtgcagacccagatccaggtgagcggggaacagggtgagggcccgagtgtcaggagtgggtgcccggcctttggattgtgtgtctcgcgggctttgcgagctcccagcccttgcggctgcactgggtggtgcactggagggaagtgttgtctcctggcctcaggtttcaacccctctggctcctgggaaggctcctctctgccggggcctgttccagctgtcgccagctttgccttcatgttctggacgtcgatctccagctctgtggggtacagctgccctctcccagttccaggctcctcttctcccttcctggtgtcttttttaaaaatatattttattttattttttgatattttttgatatttcttgttcatcaagttctacctggtgtctttgggagaactgagttcctgatttcatgtgtgcagtgtgccctcycgtcttcctctctgcctagagcttttatgtcctgcttcctcccagagcttatggagttacctccctgcatccttctctaagagcgggggagtggtaccttcttagctggtcttccaccctcctggagttggtttttgggtatgagatagaaacaggaattcagttagagcaggggagttttaccttctcagctagtcttacatcctctgggaattggtttttgggtctgagatagaaacaggaattcaatttgatgtgctctatgaataccctattttcagccccatttatttaaaagcccaattctgtcatccatcgatccacagtgccgcctccacctgagatcctgtggggaagttcagggcttcttgtctcagaggccatgctggtcccacggcgctctcgctatgagcggcagtgacacttggtgtctggagggcgagtccccctaccacacccttccttgggtgtagcgtgcctattcttggctctttccacttctgtgttaattttagttagcttagttcatacactacaatcaaaactgctgaaagtttttattagaattgcattgattctgtagctgttcaggggagagttgacatctttacagtctttccttcagattcaccaatatgatgcatcttttgttacttaagtcttttttaatgccttttaatgaagttttctaatattttgtgaaagtgttatagattatgttagttttattcttaagcaatcagtattttttgatgcttttgtaaatggtatgcttttaatttccattttctgtctctggctgttgtacatttttgtacattagttttttattctggccgccttgctagattctggttatttgaataatttatcttaggatttggttttgttttgttgcatttccttcgtatacagttgtatcacctgtaaatcatgacgatctacttctcccatcttaaacccttgctttctcctgccttactgtgctggctgggacctgcagcacagtggtgaatgtcagagtccgtatttcactgtgaagtagggtgtttgctgtgtttttgtcagagtaagaaaattctgttcttttctactttgcttgaagtttctgttcctctttgttacggtgctttttgtcttgtttaaagcccatgtgtatgaactccctccctcccttacacatctcctttagcctcaaagctttaagtcctgtctcggtgcgaatgatacccagattcatgtctgtagccacttactgtcctgagttccagattcttcatcctacctgcctttgacagatccatggagatgtctgatccctcaggcctcaggtgtgtacgcctgacctgctcctaccagaggcttccggctcaggaagggcagctgtccctgcagacctttagcctacttgagaaacccctacagtcatccatacaggtccagcccattggcaggcagctgtgtgtgcttgacttccagaagagacctggagcagccgcttcctgttgctactgtcagctcctcctccgcacccttccctggttgttgccatctctcctgcttcctttttgccatccgtcccccaggaatactttgtggttgtgtgggtgggtcgggggtgtgggggtgtggatgtcttctgcagagccctgctgcccacggctcctggcctgtgcacccctctgcacttgctcctctgcacctgtgcccctaccagcgctgctcacagtctcccttcctgctcagcttttctgctctctgtttctgtattatcaccttcaacaaatactataagtactttgttcaggtgattttgtctcctccaataaagcaagccccatgagtacaggtgtgtccgagggctgttagtacagtggacagatggactgttgtagtgggttatagtcattgaatcttgtgatgttcaatcattgtgttctggggtgactcactgggtcctgtggtagttgtcattgtgcatggatgagttcaattactgctcttgtgtgtgtgacctcacggcatcggggcagctcagcctcgttcgtgcgctctgcctgccttgtcaggtctgtttctgagacgcgctcctgcttgtgttgcccagggtggcctcgaactcctgaactcaagcagttctccctcctcagcctccggagggcccgggaccgcaggtgtgtgccacgatgccgggcttttgccagggtttttacttcctttcctttcttttattttgctattcattttctaacttgttaagatggagtaccacctgagcttatttcacaaattttattatttggttttccttcagtcctaaatgtttttgaatttccattttgatttcttatttactgcctgggttctttttagaagtgtttcttaatttccaggtgaggttttccagttactttttattattgacttaaaaataaatcttcattgtattgtcagagaatgaggtctcaatgatttcagtctttgaaatttgttgaaacttgctatctagtccagaatacagtcagttttaaaaaatggtctgtgtccttccagagcagtcttcaggatgggttcacttgtgagatgattttgttgtaactgggtcaagtttactgtgtgtgtcatttcggtcttctgtgtgtcctgccaatcacttgtgttactagttattgagaaggcgtgtttagatgtcccattctgagtatgcctttatctgtttcttcttacctttctctctggttttgctttatatcttagaaggcttttcattagccacatttaagtttaaagttttgaattttgttattttgaaatgactcttactgtcttcagtaatatctctggtcttgaagcctattctcctcacatgagtaaagcaccaccctcctgttggaagtttttggtctgtgtttttccttccttgttttcagccattctctgtgtgtccctcgtcacctcctgtgagcagctcgcgggcaggtccggtgctgttgtgaggtcaggctttccatctctgactcttacctgaaacacgtgtccacttgtctgtatataaggttgggtatatttgaatttctggcttctcttttgtttggactctgtttgtcttgcttgttctgttttttctttcctcccttccttgccttcttttgggccaccttctcttttttttttttttttatcaattctcccctctgccagtgaaaaattatatattttctttctgttctttaagtggttaccctaaaatctccatgtgcacacttctgtatcagagtatgaagttaacgatggcctccaccctcttctccagcaatgatcttatcacacagtagctcagtttattcatctcaaatgctgctgttagtgtgcgttttaattctgtcccttttccttttttttttttttgacacagtcttgctccatcgcctaggctggagtgcagtggcgcgatcttggctcactgcaacttccgcctcctgtgttcaagcgagtctcctgcctcagcctcctgagtagctgggattacaggcacatgccaccaggcccagctaatttttgtatttttagtagagatgggtttcaccatgttggccaggctagtctcgaactcctgacctcgtgatgcacctgccttggcctcccaaagtgttgggattataggcgtgagccaccatgcccagccataattctgtcctttttcatctttgactttttatgtggaattactttccttccacttgacccatcctttggaatttcctttagtgcttgaaaatgcctgtgtgtcactcttgttcctgagagacagttttgcttagtacagaattccggattggcattgttttttggggtttttttttttttttttttttttttttgagacggaggctcactctcccatgctggagtgcagtggcatgatcttggctcactgcaacttctgtctcccacattcaagagattctcccgcctcagcctcccgagtagctgggactacaggcacacaccaccatgcccagctaatttttatatttttagtagaggtggggtttcaccatgttggccagactggtctcgaacacctgacctcaggtgatccacctgcctcggcctcccaaagtgctgggattacaggcatgagccaccgcgcccggtcggcattgttttctgagtgcattcacggtatcatttcctcactgtggctgcttttgttgttgaagaggagccggtgtctgtccagcgtttctctcttccagggtcacctgtctcttccccaccgactgcctgttattgagacgttgtctttgtctttgttgttttgggtcacctctctcccccaccgtctgcctgttactgagacgttgtctttgtctttgttgttctgggtcacctctctcccccactgtctgcctgttatcgagacgttgtctttgtctttgttgttttgcagtttcattccaatgctccagcttcttgaatctcgggcagtctctctcatgtctttaggaaataagcagccactgtttgtttacgtgttgcccctgtcctgcttcctctgccctccaggtctctcagcagcttttgtattttctgtgtctttgtctcgtcgtactatattctgagtcatgtctttcgctctgtctcctcagtcactcatttttcccttggttaagtcaaatctgcttcaaagcttgtctgttgaatttttatcttgatgatttattattttattttcagaagttcccaaataatgcctggtctttgtttatagtctcttgtttccaggcctcgcagagtgagtgaggtgtttttctggatctggtgatttccctgtctgaaatgtgctgcatctgcggggacccctcgcagcctggggcaaaggtggagttttgcttccgcgggcaccttcaggtgccacaggaacactgcttggtgtgtggctcaggctttcactcagctctcaggtgttacccacctggcctctgaatctgtgtctcctcctctctcctccccggcactgaggcttagggcaggtgcttttcttacagatgccactggaggaaggggatgctttctttgcagcctttgggtacctttgtgggtacagtgtctccctccaggatggcagctggcagtagcacggggctcttttgcragctccccaccgagaactggcctatacctggtgtctggtcagctgtgtcctgtgcgaccctggagatcacggggtgcgtctccatgtggccagcgatcccgggcagaggttgtgcagcttttctgctccgtgactcgtgatgcccgcctgtgcttaggtttggagactggcagttcctgactctttgcaggtttcttggtacatttaagatttcttgctagtgctttatttaagacgtctcaggattttcagtgctgtgccaagtaagtcctggaccattgtggtcttgagatgggccctggagcaccggctgcatctttgtttcccagcagttccacagggggcgctcagggcacttatcttagtgaattttatttataattgtttaagtgacagtaaactagtaaatgccttctgattgattttaattttagtaaggactaacatttatttcgacctttgttcatgtgtgrgtaaatcatgtaatttcacatatttcgcagaataatcttgggaaatattattttcatccgttttctgtaagtaacaggacccagcaagagaccagggtccgtgagggccttgtgcagggagggcccttgaaatcagggcccccagcagctgcccacgctggagcctctcttgtgttctgggtgcacgccatgacggtgctgataggacacacaggtggcccagagcctcttactacgtcaagacagcgggagatgcatgcagtagcaagtgcacagaaagtgggcactgggtggaaagtgttgctttataaatagccagatctcaatcatgactaagaagaatgtagaaaaatgataaaattaccagcctcaaaaccttggtgcgtcaccgggttccccacttcagctggctgccctagctgcactgtacagctcattactggaacgtcgtccaggcctgtcatatgcagagcccttgggactcacaagacgctcaaatacttaccatcctcagtctgattctttcatataaacttgcagtcgtttttgtgaaaagaaaaaatgtgtctgaaatatgagaccaaaaataagcttaaatgatgagtgatggcaaattggggaggcagtcagttgactcaccatgcagtggaacgacttgctctctcactgctgcaggtgggcacactacgagaattgctcttctgtgtcacctggtyattgtgttttttgcattaactgaggacagaaagggaggaaaaatctctttttgtgcacatactcctttgaattgtatgtttggctttttttgttttgtcaaaggttgcaaaacttcctcaagttgttcaacagcaaacacccgtggccagcatccagcaagttgcctctgcttcccagcaggtaggacgcatagacaaagtggaaacctcacatttcccaggtcagagaatgggttgttttcatctgaggtcatgattagggaatcacttttgatttttgtgatacacacaaaaacattaacttcaggggaaaaactagatacacttaataatgagaagagtgaacaagcgtttagaggttgtgtcagccatactgagggagcctcaccttgggctcattcccaggacccttcattcactgatcatcgcgggtgtgtcctgcaagtcgcagacactgccctgtggttttagggaggcacaggcctcaggcaagcaggctccgctcggggcccgcccttgagcagaggcgctgtgggcacagtggccttgcctcccacagaagcccttcaggcgctttcactgttgtcactgatgctccacaatatgactctttagcacagtgctttaaatgtaaagcggtgctttaaactttctaaattttgtttaaagtcacactggcatatagatttcaagaaaccaaactctattaaaagctttactacaacaacaaaatcagtccctgacccagctctcacccttttcccaagaggcatctggtgttagtctaaaagcaaccatcttttaattttccacttgtgtttaattggaaaccagaggtcatactgttgtgtgactggtcattcttccgtgtcataaaagcatagtcagtgaagtttctcgagtcctccccatcccaaagaacgtccattttcctgtccctggactgagtttcctgggcaatgtgtgttttctgactctctcggctcaggcttctccacagactgtggcgctcacgcaggcgacggcggccgggcagcaggtgcagatgatccctgcagtgaccgcgactgcccaggtggttcagcagaaactcattcagcagcaggtggtgaccacggcgtcggccccgctccagactccaggcgctcccaacccagcccaggtgcccgccagctccgacagcccaagccagcagcccaagttacagatgagggtccctgctgtcaggctaaagacacctactaagcctccgtgccagtagtcagggcagcagggctgcctctcatctaaagcaaaactaccttcctcacagaaaacgctttattagtgaaccttgggaccatgtcacgcaagagattcagcactgggaaagatataattgaaacaaaatagtgtaatcattttattaaaatgcatcccacactgcaggacaaatggtccttatggagtgccgcgttctctgtactacgtggctcatggaaaaagtgacaacatggcttcctctaaatcatttcaccttttcagtccccacccgcacccgtcccctagagccatagtactgtgttnnnnnnnnnnnnnnnnnnnnatagtactgtgttctgaaagccatttagaatttctttgtgagcatgtagtgctttgcacgccacagaagccgtctgccgtgtgtgaggagcatacaatggactttctaaagataaggcgtgggcttccacagtgtctgccagagtttagttctttataccttactgaaaaatgcctcgtggtcttcgcagaggggaaggcctgtctaaagtcaatcatccgagatgggttttccattccaaagaaaggcaatatggttccttccttccctcctaaaatatgacttaacttttaagagaaatgttctgacacccacctaaacacacaaggcacgttcctggcctgtgttcaagggaaatgatcagtcattgcattgttattccaaagagcagccaacagtggcctcccccaggccctaccctgcaatgggattcgctttcatttaatggaaacttctgggactgatgcccaactcagtgcactcaagacgcatctccagytttcgggggaagctggtatttgacatagtgtgttaaacagctcctgagaacctttgggacactctgccatggctggcgtgaggcccagaggaccacgcagaggcaatggtagtacagatgtcacagctgagggtacgatgaggcctgggctcagtgagccaggacgaatgtgacagacaccccttgctgccacagtcagccctttgacgaaggtgggctggtgattctggaagtattggctatagcggtgggcccagtcaactcttccttgtggacttacgacagcagattttctctaggataagcttgtgtggttctgccagtgaagcagagaaccacctgtgctgttgtggaaggcgtgccgttgagggggaaaacgaagcccagtatttgctactgtttttcctttttttactatgacaggaaaataaatgcaattttagtggaattgattgacagtgtctccttactttgaagttttcaccaaagcaaaaaggtccatatccaatagtatcctttgtgctgtggcttgattttggcctattttacattatttggtccaggaaattaggttatattaggttttttgtatactaaaaatcagttatggcacaataaagattttctgtttttaaattgtatttcatctgcttcctccccattctctcactttaagtgacattgaggaaggtattctgtcccacaggtttctgtggacagcgatacagcaggagtcagtgaaatcaactggggagctcacttgagctcttgataagaaatgtggagaaaagtaaaaaccaagctttgaagaaacagaagaaattaatcttttagttagttgaacataccaaagcagaggactggaatctgtttgttctaaccaacccgttctccctggcttggcacgtgccgtgagagcgcagcttgccggagggagggccgctgtgtgcgcctcacatctggctcccagtggaaacttttactcctcctcatccgcagatgtgatagaactgaagtatctaggaattctgcctttgtcatttgttttaatttgtgtgccctgttcattttttttgtctttcccaaatcttggtagtctccttatagttgaagataaaatgttgagtgcacttattttagaatatcctagacataactgtctaagtaaaagcgctctattaatctaaaacactacaagagaatttaacaccatctctcaaatgcttttttggagagcttaatgggattctgaatatttgcaatgtggagtttccgccccgatctcacgtcagtgagggtctcctgtctctcaagtgtgtttcctttggctgttccctaatacaaaacacggacatatttttactcgtagcactcaatttagtaacttctagatgctaccgttgacctgagttaaattcatttagtcgtgtacgtaaaaactctccttttagtgtgttattttcttggccttcccttttaaaggttaaagtttctaacctaagaattaagtacgcgttcaggaagctgttgtctaggccttccccttgtgaatctgggttcattccaatacggcaagtaagagttggaaactttgagaacacagactataaaggcagcagcccgaacactgtcagactctaattggcgaccctgggaaacagttgccctgctattctttaaagaaagacgtttattctgatgataaaaacagttagccagactgtttttaaagcacctggcgggaagcagaaggttggatccaagcccttgttcagatttggtgcctgataagacaggggtttctctttttgtgacctttattattattattttgttaactgttgtaaccagttagctgttgtgttttaagatagaaaggaacaagactaaaattgtaaatactttgtaaacatcagcatttgtacttgaatagtaggattttaaagggcattgatagcataccaaacaaaaggcaaaataaagtgacctttttatatattttttcattttgtctttcatagaaaactggtatttaagttaaatgagatgctgaatttttcatttgtgtgaagaaaaaaccaacaagtaatgttggagccagaggtgttcccctcacccactcttccgtggccatagaaggacctggaaggaacagaaatcacattcaccaagtccaccaggcagccgcttcccaaagccgcacgtggaggaaagagctggcaccgccctgccccatgtggcctgccaccctcacagcacccgtcgtcaatgtcctgggggccacactggcaccagtgtccttccacacccagtctgtgtgcccaactggcaccagtgtccttccacacccagtctgtgtgcccaactggcaccagtgtccttccacacccagtctgtgtgcccaactggcaccagtgtccttccacacccagtctgtgtgcccaagtaagggcagggacaccggctcacaggtgctcaccaccgaaaacgcctgtgagcagatggcctgcgagttgttgcttctctttttcttctgcttttagacttttcttcgtttcgttttaaatctgattacaaaaatcaacgtacacttttaattgaaaacgcacacattacgcaaagtaaagaagcatcccagaagccccttagtttctgtatcttttctcccaccacaaaaacgggggtgcacgggcacttggccctgcagctttgggcttccacctccggtcttccagattgaaagctcccagggtctggttgcacacttcgtgtctgcaggtgatagtgcagataccagggtgggcgagaaagccagctgcaaagcccggctggtgctccctggcctctgggggtctgtactgcagtgcctggtgcacctgcggctccatgcctaccagccacataaccaggggcaggtgacttcctccttcagggcctctgtgtccccatgtcccctctcctaaggtggcttgaggatccagtccaatgttgggtgctgcacttggtgtctgtcttttatactcccaacgaagaggactgcaggttttgcaaagcctactgtttctgtcatcctgaccctaccatcacgtctttgccaagtgtgcctgtggcagcaggccctatggcgggcttatctggcctggaagctgtgtttctgtttgctgtccagtagcgaccaggggccagtgggtgaagcaattgtgcctgcgcacagccgtcaagaccttaaggtagcttctgagcccggagtgtgttgtgtcacctcctactcgagatgtcagatcgtgtgacagctgcccaccaacaccccagagttgggcattgtgatccagggcaatgggaggggagattcctttgccatagggtgccctgctatgctgttgctgcagcatctattcccctaatttttctaaagttcccattttattgggtagattatgctatatacattcggtggaatgcagtgcagcctctacaaagtacagctgtgctgggggatgagtttgtgaagtatgctaccaggatggaactggttgtatgcctggatgtgcatagaatatcctggaagtatttgcccctgcatgtggtggattctacgtccatgagttcaaccgaccaaggagcaaaaatattcagaaacaaaaatgtgtctatactgaacatatacagaccttgttttgggggggttattatttcctaaacaatgctgcataacaactatttacatgacatttacattgcattcactattgtaagtaacccagagatgattttaaaaagatgtttttgagttatatgcattttgcatcaggggcttgagcctctcggagtttggcatccatgggaggtgctgagggacgattgtacgttgtgttagcactgcctctgtggagggagagactggggggcaaggatcaaggctgctgatctgcactgttatgcgcgtccttttaactgttcaggtagtttgccaagtgcatgaatttttgtgtggtgggggcggggtgggggtggggacagtcccactcactctgtcgcccaggctggagtgcagtggcgtgatctcagctcactgcaacctctgcctcctaggttcaagcgattctcctgcctcagcctcccaagtagctgggattacaggcgcgcaccaccatgcctggctaatttttgtatttttagtagagatgggctttcaccatgttggccaggctgttctcgaactcctgggctcaagtgatccgcccgcctcggcctcccagattgctgggattacaggtgtgagccaccgcacccggccatgaattaatttttaaaataaggccctatcagcttttttgtcacatggtcccctactcgggaacctttatttccgacctcctgcctgatcttgtgtagccacctacactccgaccagcccccagagcagcatcgttctgccccctgtgcagcctttcctgtctccctgactttgtgctcgtctcctttgttgtaaagtatttctcctactttgaagactactcccacttaactaagtgtgcatccattcattcattcatttattcatttctccccagtgttctcctccagtagtatcttgggctgaacaacagtatttgtcttatttctccagctgtagtgtggctctgttttatccctattcaatgaatatttaatgtagcatatttcatgccaactttaccactagtgctggagtggcggaaggacaacacttggctgtttaagaaaatcaaagctggccgggcacggtggctcacacttgtaatcccagcactttggaaggccgaagcgagcggatcacgagatctggagatcgagaccatcctggctaacaccgtgaaaccccgtctctactaaaaatacaaaaaattagccgggcgtggtgacgggcgcctgtagtcccagctactggggaggccgaggcaggagaatggcgtgaacccgggaggcggagcttgcagtgagccgagatcgcgccactgcactccagcctgggcgacagagcgagactccgtctcaaaaaaaaaaaaaaaaaaaaaaaaaaagctgatcagagagatggatgaattactggtttattcagctgtttataaagtacatactatgtggcagtttagacaactaggctatacttgccagcaaaataaaaaagggggttgcatcctagcaggtcagataaaataattcaggggataagtaccatgaagaaatggacaggtggtaagtgatacgggtttcactcttaaatagatgggcaggttatgcagtggaaggcgcctgatgcacagctccaaagctcacccgtctacagtggacacgacgaaaccagggacatgtcccaccatttcagtggtcacaggcaagagtcttgtggatcttcggatcccacgtaacatctcatctccctaggcaccccgactcccctgcccaatttaaaacagacctcagcctgccccatcccggctgctttgcctggtgctcttctaactgcatgtttatctatcctccccgcctaaactgtagggcccgcgaggggagccgctagctgtgcttgtcagtgtgaccagcgctcagcaggtgtccggcggnnnnnnnnnnnnnnnnnnnnnnnnnnnnnnnnnnnnnnnnnnnnnnnnnnnnnnnnnnnnnnnnnnnnnnnnnnnnnnnnnnnnnnnnnnnnnnnnnnnnnnnnnnnnnnnnnnnnnnnnnnnnnnnnnnnnnnnnnnnnnnnnnnnnnnnnnnnnnnnnnnnnnnnnnnnnnnnnnnnnnnnnnnnnnnnnnnnnnnnnnnnnnnnnnnnnnnnnnnnnnnnnnnnnnnnnnnnnnnnnnnnnnnnnnnnnnnnnnnnnnnnnnnnnnnnnnnnnnnnnnnnnnnnnnnnnnnnnnnnnnnnnnnnnnnnnnnnnnnnnnnnnnnnnnnnnnnnnnnnnnnnnnnnnnnnnnnnnnnnnnnnnnnnnnnnnnnnnnnnnnnnnnnnnnnnnnnnnnnnnncgctgtcagcagcgctcatccgcgccgggagcccttggctgcgtcgcccggcagccgcggtgagtgacggcccgcgtatccgctgccggggctgtggcgggcgtgaggggttggccctaccctcggcccccgaccgcccacatccgccggttaccctcgaggctccccggccgcgcgctcccctctctccgtcccatcacccggtgaccccggctgagcgaacgcccacccctccctcagggaccccctccccgtgacacgatcccccgtgaacgcccacctccctcagtgaacactcccccgtgacatgaccccccgcaaacgcccacccatccctcggtgaccctgcgcccgtgagcgcccacccctccccctgcgacccctccccccgccacctggcaactgccgttttcccgccttccctcctccgccccctctcccgcatcaccccgttttctggtgaccgctcccccccatcccgtgacacaaacccccgacctcccagcccttccccggtgacacgatccctgtgaccgtctggcccggtaaccgcccctcccctcatgacccttcacccagtcccctggtgcccacccccgtcactgccgcccgcctggttccagcctcgcgagaccgctgtctacggcgctgacgccgcctctgcctcttgaccccttggccccgctgtcctgatccctgaggtcggggcctggtctgcactccaggaaagacgagtgcgcttagtgtgcgctgcacgtgagcagtgaagttgattccacgcgctgcgctgctcggcagctgtcccagaactgaccacggacccctccgcgggtcctgctcctgacaagggccttccggcactgggagttttgtgttagtggaaaggaagaatctaataataccaccacctttacagtaaagacgctgcgaattgacgccttttataataaagacacttatcttgcccaagagctgggtgagtatttcctccttaccaaaaagttggtttacttacagttaactggctgaaagtttgagtcttaggcttatttgtgccgctccaggcaggctgattggcgctggtttccatctgtcagattggacagcagtaccactggctgttgggggctcacgaccagatagagtcttgtctgggaaccacaagtgagtgttgttaccacagctctgcagcagtgagggcacctctcaatccacgtgcagtcgccccaccttatcttcaggggatacggtccaacaccctcaatggatgcctgaaatcaaggatagtagtgaacactatatacactgttttgttatgcatccttccatatctacgataaagtttaattcataaactaggcacaggaagagattaataacagctaataataaaatagaacagtcgtaacaatatactgtaataaaagtcatgtgaaagtgatgtctctctcctaaaatatcttactgtattgtacgcacatgtttttgaactgcagttcaccgagggttactgaatccatggataaggggagattacagcagtttcttttctgactatgttattgagacttcaaaactaactaaattgttcgttgaatggaattgtccaaggtgtacaaaatgacagttgtaacacaaaggtgtttcactgacatccctgtcacgtttttgctaaactaatgcacttttaaaaattattatttatgctgggtgtggtggcttatgcctgtaatcccagcactttgggaggctgaggcgggcagatcacctgaggtcgggagttcgagaccagcctgaccaacatggagaaacccgtctctactaaaaatacaaaaaaaatcagccaggtgtggtggtgcttgcctgtaatcccagctacttgggaggttgaagcaggagaatcgcttgaacccaggaggcggaggttgtggtaagctgagatcacaccactgcactccagcctgggcaacaagatcgaaactccgtctca

SEQ ID NO: 94637 - DNA, 43580 bp, Homo sapiens
  misc_feature (1)...(43580): n = A,T,C or G
atgatttttgtcgaaaaatggacaaatggtctgaggtgcctgacgtccaggcgttcttttacacatcggtccctccctagtctctgttcccaatgcgactcatcccaaatcctccttctttccctctcgcctgtcccttcagtcccaaccccaagcattgctgagtcttttgaatcttccttttctacagacccatctgacctctcctccccaggctgctcctcgccaggccgagccaggtcccaattcttcctcagcctccgctcccccaccctataatccttttannnnnnnnnnnnnnnnnnnnctaaaggcatagtcaaggttaatgctcctatttctttatccaacctttcccaaatcagttagtgtttaggctctttttcatcaaatataaaaacccagcccagtccatggcccgtttggcaacaacccttagacactttaccatcctagacccagaagggccagaaggctgtcttattctcaataaacattttattacccaacccactcccgacattaaaaaaaagctccagaaattagactgtggccctcaaaccccacaacaggacttaattaacgtcaccttcaaggtgtacaataataaagtagaggcagccaagtagcaatgtatttctgagttgcaattccttgcctccaccgtgagacaaaccccagccacatctccagtacacaagaacttccaaacgcctgaaccgcagaggccaggcattcctccaggactgcctgtcatgcacgtccatgtgaagagaccaccaaacaggctttgtgtgatcaataagtctgtttatttcacctgggtgcaggcaggctgagtccgaaaagagagtcagctaagggtggtgggattatcattagttcttataggtttgggataggcatacaaagtatattcttaagggagggggagaatattacaaagtaccttcttaagggcagggtagactatatcatatcagttagggtggggcaggaacaaatcacaatggtgtatcgttatcagttaagtctatttttacctcttttgtggatcttcaattgcttcaggccatctggatatgtacgtgcaggccacaggggatatgatggcttagcttgggctcagaggcttgacaccacctaccccaggatcttgcttcaagtgctggaaatctggccactgggccaaggaatgcccgcagcccaggattcctcctaagctacgtcccatctgtgcgggaccccactggcaattggactgtccaacccagcagccactcccagaccccctggaactctggcccaaggctctctgactgactccttcccagatcttctctgcttagtggctgaagactgacactgcccgatcacctcggaagcctacaggaccatcacagacgctttgggtaactcttacagtggaaggtaagtccgtccccttcttaatcaatacggaggctacccactccacattaccttcttttcaagggcatgtttcccttgcctccataactgttgtggatattgacggccaggcttctaaacctcttaaaacttcccaactctgatgccaacttggacaacattcttttatgcactcttttttagttatccccacctgaccagctcccttattaggttgagacattttaactaaattatctgcttccctgattattcctaggctacagccacacctcattactgcccttttccccagttcaaagactccttcacatcctccccttgtatctccccaccctaatccacgagtatatgatacctctactccctccttggagaccaatcatgcaccccttaccatcccattaaaacctaatcacccttagcccgccatgctttaaaaggattaaagcccgttatcacttgcctgttacagcatggccttttaaagcctataaactctccttacaattcccccattttacctgtccaaaaaccagacaagtcttacaggttagttcaggatctgtgccttatcaaccaaattgtcttgcctattcaacccatggtgccaaagccatatactcttctatcctcaatacctccctccacaacccctccataacccattattctgttctggatctcaaacatgctttctttactattcctttgcacacttcatcacagtctctcttcactttcacttggactgaccctgacacccattaggctcagcaaactacctgggctgtactgccgcaaggcttcacagacagctcccattactttagtcaagcccaaatttcttcctcatccattacctatcttggcataactctttgtgaaaacacacatgctctccctgctgattgtgtccagctaatctcccaaaccccaatcccttctacaaaacaacaactcctttccttcctatgcattgttaggtacttccacttttggatacctagttttaccatcctgactaaaacgttacataaactcacaaaagcaaacctagctgactccatagatcctaaattttttcaccactcctctttctgttccttaaaaacagccctagaagctgctcccacactagctctccctaactcatcccaacccttttcattacacacagccaaagtacagggctgtgtggtcaaaattcttgcacaagagctgggaccgcaccctgtagcctttctgtccaaacaacttgacctcactgttttaggctagcccccacattattccggataccacacctgacccacatcactgtatctctctgatccagctgacattcactccatttccccatatttccttctttcctgttcctcaccctgatcacacttggtttattgatggcagttccaccaggcctaattgccactcaccagcaaaggcaggctatgctatagtatcttccacatctatcattgaggctactgctctgaccccctgcactacctctcagcaagccgaaccaattgccttaactcaggccctcactcttgcaaagggactacgcatcaatatttatactgactctaaatatgccttccatatcctacaccaccatgctgttatatgggctgaaagaggtttccttactactcaagggtcctctatcatgaatgcctctttaataaaaactcttttcaaggccgctttacttccaaaggaagctggagtcattcactgcaagggccatcaaaaggcatcagatcccatcgctcagggcaacgcttacgctgacaaggtagctaaagaagcagcttagccttccaacttctgtccctcacggccaatttttctccttctcatctggtcactctcacctactcccccactgaaacttctacctatcaatctcttcccacacaagacaaatggttcttggaccaaagaaaatatcttcttccagcctcacaggcccattctattctgtcgtcatttcataacctcttccatgtaggttacaagctgctagccctcctcttagaacctctcatttcctttccgttgaggaaatctatcctcaaggaaatcacttctcagtgttccatctgctattctactactcctcagggattgttcaggccccctcccttccctacacatcaagctcggggatttgcccctgcccaggactggcaaattgaccttactcacatgccccaagtcaggaaacaaaaaaacctcttggtctgggtagacactttcactggatgggtagaggcctttcccacagggtctgagaaggccaccgcaatcatttcttcccttctgtcagacataattcctcggtttggccttcccatctctatacagtccgataacggaccggcctttactagtcaaatcaccgaagcagtttctcaggctcttggtattcagtgaaaacttcatacccattattgtcctcaatcttcaggaaaggtagaatggactaatggtcttttaaaaacacacctcaccaagctcagcctccaacttaaaaaggactctgtcaaggatagagccccaaaactcaccaaccaagcaggtaattatgctgaacccccttgagcactctctaattggatgtcctgggtcctcccaattcttagttatttaatacctgtttttctccttctcttaattcagaccttgtgtctttcatttagtttctcaattcatacaaaactgcatccaggccatcannnnnnnnnnnnnnnnnnnnnnnnnnnnnnnnnnnnnnnnnnnnnnnnnnnnnnnnnnnnnnnnnnnnnnnnnnnnnnnnnnnnnnnnnnnnnnnnnnnnnnnnnnnnnnnnnnnnnnnnnnnnnnnnnnnnnnnnnnnnnnnnnnnnnnnnnnnnnnnnnnnnnnnnnnnnnnnnnnnnnnnnnnnnnnnnnnnnnnnnnnnnnnnnnnnnnnnnnnnnnnnnnnnnnnnnnnnnnnnnnnnnnnnnnnnnnnnnnnnnnnnnnnnnnnnnnnnnnnnnnnnnnnnnnnnnnnnnnnnnnnnnnnnnnnnnnnnnnnnnnnnnnnnnnnnnnnnnnnnnnnnnnnnnnnnnnnnnnccctgaaaaacatcgcccattatctctccataccacccccaaaaattttcgctgccgcaacactttacgactatttcgttttattcttcttgttaacgtaagaagacaggaatgtcaggcctctgaacccaagcctgcatgtgtacatccagatggcctgaagtaactgaagaatcacaaaagaagtgaaaagggccggttcctgccttaactgacccctgacctagcaactgatgttatctacagattatagaaagacattgtgaaacttcccggtctgtttcactctgaccaccggtgcatgtcatgtaccccctgcttactcaatcgatcacgactctctcacgcggacccccttagaattgtgagcccttaaaagggacaggaattgctcactcggggagctcggctcttgagacaggagccttgctgatgctcccagccgaatatactccttccttctttaacttggtgtctgaggagttttgcctatggctcgtgctgctaccatcctgcctgcacccaggtgaaacaaacagccttgttgctcacacaaagcctgtttggtggtctcttcacacggacgcacatgacagtggtggcaggcgcctgtaatcccagctactcgggaagctgaggcagggagaattccttgaacccgggtgacagaggttgcagtgagctgagattttgcactccagcctgggcgacaagagcaaaactccgtctcgaaaaaaagaaaaaagaaaagttcacagtgatgatgcccaccaaaatcaaatagaaggtctcacacatccaggaaactagagtaggggatgagatgggaaaaggatctacaggagcttcaactgtgacaaaatgttaagagctgaaaaagttgctgatgaagatacactgtgattttttcagagcattttttttgcatctactactgtaaaaatcaaatgaaaacaaaatctagaccaaaacgactgtctcctttaagaaaggagcgataggctagatctgagaggatgactgtggagaatattcggactctgactcaacgacctaaactgcctcattggctcagttacctccctggtccctgtatacatttgagtttgcgatccaacataattaaccagtcgatctgattccaagtcaaccatttaacaacctgagcacaaaatttaagcaggcagtttcttcccttgtgggaagggaatgacaacttcaactttatggattgttgtgagcgtcccaataacttgtgtaaaactttcctaaaacgttaagtgtgccagacacatactggtttatatgggtatcagctaattcctggatccagcctttatttccacggatctagggaataattttacatggggaaatatacccctcgaaccaaggagttcccccagggccgaagcctgacttggcaggaacacaaaacacctgaggaggggcgcggcggccctagcctggtgcgcatgcgccactgtaaaggccgttaggtctgtccctggcgcccgattagaatatttaattccagttggagcgtttttcctcaccttactgtattttatttcggtaaatacccacacattttaatttctgagaggcacaaattcctctcagactcattcaaattgaccgagtagtcttataaggtgccttttgtctcattgtaaatcctcagtaaagtttgcagtttaggatgataacgtgatttttgcgtaaaaataacaactcatttcacctgaaaaggaccacgacaggagcagggactcgagtttctttttattcgggcacttcagtagttacctcttgcttgggggtggtgccgcgtgtggacccgatggaccccggcgacgccgccattttggagtcttccctaaggatcctctaccggcttttcgagtcagtgctgccgccgctgcccgcggctttgcagagcaggatgaatgtgatagaccacgtgcgggacatggcggccgcggggctgcactccaacgtgcggctcctcagcagcttgttacttacaatgagtaataacaacccgtgagttgaggcgggtagctgcctggggctgaggagaaagcggcggcggtctgggagcgggggctcagggcacgtgggaacaggcgggaaggagcggccgccggcgccagcggaggctccggggtctgcgagggcgtcctggagcggagcagacttcggagcgcaagttgggttcactgggtgccggcgtcaagtcccgcggggatgtggcgagcggcggcttggagacatagaaggcagaggctctgaggacgacccaggcgagggtttcctgaggcacctgtcgcggggcagcgcgactgtcacatcgctaggctgaatccttccctctcggctccttccagaagaacgtttttttctctcgctgcagctcagggacccagcctcctggtttttatgcgctagcccccgcatctgagattggtccccccgttaagtgtatcaggagggtccactttctggccttgggaaacccctgaaaacggggccgggcgcggtggctcacgcctctaatacgagccctttgggaggccgaggcgggaggatcgcttgagcccaggagttcaagaccaacctgggcaacatagggagaccctgcctctacgaaaagtaaaaattaaacaattagccgggcgtgatggtgcgtgcctgcggtcccagctactcgggaggctgaggcaggaggatcgcttgaacccaggaggtcgaggctgcagtgagccgtgatcgcatcattgtcctttaccgtgggcgacagaacgactgcctgtctcaaaaaaaggaaacgggagactccattaatgggtgggcgtggcgcctttcatgtttccttgaagcactgagctgattccatccttgagtgcatgtccctctcctgcttaatatcctttattggccgggcgtagtggctcatgcctgtaatcccagcactttgggaggccgaggcgggcggatcacgaggtcaggagatcgagatcatcctggctaacacagtgtaaccccgtctctgcttaaaaaataccaaaaaaatttagccaggcgtggtggcgggcgcctgtagtcccagctactcgggaggctgaggcagaagaataacgtgaacccgggaggcggagcttgcagtgagccgaagtagcaccactgcactccagcctggacgacagagcgagactccgtctcaaaaaaaaaaaaaaatcnnnnnnnnnnnnnnnnnnnnnnnnnnnnnnnnnnnnnnnnnnnnnnnnnnnnnnnnnnnnnnnnnnnnnnnnnnnnnnnnnnnnnnnnnnnnnnnnnnnnnnnnnnnnnnnnnnnnnnnnnnnnnnnnnnnnnnnnnnnnnnnnnnnnnnnnnnnnnnnnnnnnnnnnnnnnnnnnnnnnnnnnnnnnnnnnnnnnnnnnnnnnnnnnnnnnnnnnnnnnnnnnnnnnnnnnnnnnnnnnnnnnnnnnnnnnnnnnnnnnnnnnnnnnnnnnnnnnnnnnnnnnnnnnnnnnnnnnnnnnnnnnnnnnnnnnnnnnnnnnnnnnnnnnnnnnnnnnnnnnnnnnnnnnnnnnnnnnnnnnnnnnnnnnnnnnnnnnnnnnnnnnnnnnnnnnnnnnnnnnnnnnnnnnnnnnnnnnnnnnnnnnnnnnnnnnnnnnnnnnnnnnnnnnnnnnnnnnnnnnnnnnnnnnnnnnnnnnnnnnnnnnnnnnnnnnnnnnnnnnnnnnnnnnnnnnnnnnnnnnnnnnnnnnnnnnnnnnnnnnnnnnnnnnnnnnnnnnnnnnnnnnnnnnnnnnnnnnnnnnnnnnnnnnnnnnnnnnnnnnnnnnnnnnnnnnnnnnnnnnnnnnnnnnnnnnnnccaccgcgcccagccgaccagtctggtcttcaactcctgacctctggtgatcccgccgcctcggcctcccaaagtttaaggattacaggcgtgaaccatcgcttctggcctctttgtgttatttgaatgcaccaagcgtgttctctactctgggcccttgtacttgctgttcctcctgcgacggtcctcatctcagcgttgcctcctccttcaggttttagcctggatatctctcctaaagagccttctctgactcccaggactctcgggtactcccacttttctacccttcgcatcacccaccaattgaaagcgcagtggctgtgcgcaataagcactcacatgcttattgagtgtgttgaggaagtgagtacaacctcagggaggtgaaatacccttgtccaagttcacacatccaataaatggaggagtacgatgcctggacctggtcttctctgactggagagtctccattctgagccaccagtctgctacctccaaatggcgttataatggaaacttttactctgtagatgtattagtgtttggcctgctgtagaagctggtctaggtcagaagggaaaagtcctttaagtgcttacaatgcagctgctgctgcccattggattttcattagtgcactttggtgttttgttttgttttgcttttcagacggagtcttgctttgttgcccaggctggagtgcagtggtgcgatctcggctgactacagcctccacctcccaggctcaatcgatcctcccacctcagcctcctgagtagcagggattacagattcgcaccaccacgcccagctaattttttttttttttttaatagagatggggtttcatcatgttggccaggcttgtctggaactcctgacctcaagtgatccccatgacttaggcctcccaaagtgcttggattgcaggcgtgagccaccgagcccagcctcattaatgtgctttggaccttactagtgagacccacattttgccaccatccacttcatgttgacaggagccctggtctctgtcagccttatgtgtttatgctggagcctttcacttggttctgagtgatttgccaaagcatacagtttccacgtttggagatttaggccctagttactcttagttcttaaagatgttacaggatagtttgaaacagtttaattctctggctagacgaagtttagcccatgctttttcatattgggttagattggcagtttcctagcttcaggacatgtttaagttctgaccttcatgatttatactttaaaatttcttgtggaataggaatagacactgttaaattcaaacagtggagaaggggcatgcagatcagtatctttacctgagtcttgaacctcaccccaacatttcctttctccagaggcaataactattttttcgtgtgtcattacagagataacttaatgcatgtgtaagtagacatgtatcttatatgcatatctgaatgctttctgtggatgtaataatacttttgtatctaagcatcaaatggttatttctcactacatacatagaatcacagagtttgaagagaacttaagtcatctagactatactctttttgttgttttttttctgttttttctggggagactgagtctcactctgtcgccagggctggagtgcagtggcgtgatctcggctcactgcaacctccgcctgctgggttcaagcagttctccctcagccttccaagtagctgggattacaggcgcccaccaccatgcctggctaattttcgtatttttagtagagacgaggtttcaacatgttggccaggctggtcgaactcctgacctcaggtgatcctccctccttggcctcccaaagtgctgtgattacaggcgtgagccaccgcgcctggcccctttttttttttttttttgtctgagacagagtctctctctcgtcacccaggctggagtgcagtggtgggatcttggctcactgcaacctccacctcccaggttcaagcgattctcctgcctcagcctctaagtagctaggattataggcataagccaccgcacatggccacaataatgcaattctgtgggttttagtgtatttacaaaattgtatgatcatcaccatgatctaactccagaaggttttcattatcccaacaaaaagaaaccgtgtctattagtaatcactctccaattgtcccttcctcccgcaaacactaatgtatgatgcctatttttttttttttttaagagacaagatctcactatgttgatcagactctaggctcaagcagtcttcccacctcaacctcccaaagtgttgggattacaggtgtgagccactgtgcctagcttgttgagaaattaactatctacagaattattcgactcggctgggcgcagtggctcacgcctgtaatcccagcactttgggaggctgaggcgggtggatcatgaggtcaggagtttgagaccagcgatggccaacatggcgaaaccccgtctctaccaaaaatacaaaaattagctgggcgaggtggcaggtgcctataatcctagctactcgggaggctgaggcaggagaattgcttgaacccgggaggcaggnnnnnnnnnnnnnnnnnnnnnnnnnnnnnnnnnnnnnnnnnnnnnnnnnncattctagcctgggcgacagagtaagactccttctcaaaaaaaaaaaaaaaagaattattcagctcactctgttctttcatataagcaactataactttgtttttcttgtttttgtttttgtttttggagatggagtttggctcttgttgcccaggctggagtgcaatggcacactatcttggctcaccgcaacctctgcctcccagattcaagtgattctcctgcctcagcctcccgaatagctgggattacaggcatgtgccaccacgccaggctaattttgtatttttagtagagacagggtttctccatgttggtcaggtcctgaacttaggtgatccacccaccttggcctcacaaagtgctgggattacaacaggcatgagccaccatgccccggcctgctgtagcttttacttgtcaaagaaaaacagtaaacttcttcctcttatttgggaaggagtggaattggaggttgaaaatatgagttcctcattaggaatggtggtcaacttctaggcagttataattcttgactgtaatactcaaggttaaacagttttaaaacattggttcctttacactgtcctgaaatccctgagactccaggaggtaagaattctagtgctagtgaagtttacttttttttttttctgagacagggtttcattccctgttgcccaggctggtgtacaaatggcatgatcttggcccactgcaacttctgtctcctgggctcaagcgattgtcctgtcttagcctcctaagtagctgggattacgggcatgcaccaccatgcctggctaatttttgtgttttctttttttttgagacagagtttcacttgtcacccaggctggagtgcagtggcacgatcttggctcaccscaacctctgcctcctgggttcaagtcattctcctgcctcagcctcccaggtagctgggattacaggcactcgccaccgcacctggctaatttttgtatttttactagagacggggtttcaccttattggccaggctagtctcaaactcccaaccttcagtgatctgcctgcctcggcctcccaaagtgctcggattacaggtgcaagctactgagctcagcctaaataaacttttatcaaggccaatcctcttgctatcccattggctttcccgatctttttttttttaaaagacagagtttcactcttgtcgcccaggctggagtgtagtggcgcaatctcggctcacagcaacctctgcctcccgggttcaagcgattctcctgtctcaacctcccgagtaggtgggattacaggcatgcgccaccacacccgtctaattttgtatttttagtagagacggtttcaccatgttggttaggctagtcttaaactcctgacctcaggtgatccgcctgccttggtgtcccaaagtgctgggattacaggcatgagccaccacgcccagccccccattctccttttatagtggcattttctttagtttttagtgtttttttttttttttgagacgagatctcgctctgtcgccaggctggagtgcgagtgcagtggcgcgatctcggcttactataacctccacctcctaggttaaagcaattctcctgcctcagcttcccgagtagctgggactacaggcgcctgccaccactcccagctaatttttgtatttttagtagagctggggttccaccgtgttggccaggatgatctcgatcttgtgatcttgtgatctgcccgcctcagcctcccaaagtggtggggttacaggcgtgagccaccgcgcctggcctttctttagtatttgaagagctttcaggttttttcaaacttctttttgtgcattggtttttttttgttgttgttgagacggagtctggctctgtcgcccaggctggagtgcagtggcatgatctcggctcactacaggcctcctgggttcatgccagtctcctgcttcagcctcccaagtagctgggactacaggcgcctgccaccacgcctggctaattttttgtattttttagtagagatggggtttcaccgcgttagccaggatggtctcgatctcctgacctcgagatccgcccccctcagcctcccaaagtgnnnnnnnnnnnnnnnnnnnnnnnnnnnnnnnnnnnnnnnnnnnnnnnnnnnnnnnnnnnnnnnnnnnnnnnnnnnnnnnnnnnnnnnnnnnnnnnnnnnnnnnnnnnnnnnnnnnnnnnnnnnnnnnnnnnnnnnnnnnnnnnnnnnnnnnnnnnnnnnnnnnnnnnnnnnnnnnnnnnnnnnnnnnnnnnnnnnnnnnnnnnnnnnnnnnnnnnnnnnnnnnnnnnnnnnnnnnnnnnnnnnnnnnnnnnnnnnnnnnnnnnnnnnnnnnnnnnnnnnnnnnnnnnnnnnnnnnnnnnnnnnnnnnnnnnnnnnnnnnnnnnnnnnnnnnnnnnnnnnnnnnnnnnnnnnnnnnnnnnnnnnnnnnnnnnnnnnnnnnnnnnnnnnnnnnnnnnnnnnnnnnnnnnnnnnnnnnnnnnnnnnnnnnnnnnnnnnnnnnnnnnnnnnnnnnnntgactccagcttcctttggaagtaaagcggccttgaaaagagtttttattaaagaggcattcatgatagaggacccttgagtagtaaggcaacccagcctgggtgacagagtgagaatctatttcaaaaaaaaaaaagaagctgggggagcttggattgaaagggaggaaaagatgtattacattttctcttgttttctagtgagttattctccccacctcagaagtaccagcttttggtgtatcatgcagattctctctttcatgataaggaatatcggaatgctgtgagtaagtataccatggctttacagcagaagaaagcgctaagtaaaacttcaaaagtgagaccttcaactggaaattctgcatctactccacaaagtcaggtaattggagatagaattgtgattttttttttttttttttgagaaagactccaagaatttagaacagggtccccaggccccagtgcctggtctgttaggaaccaggctgcacagcaggaggtgggtggagggctagtgaatattactgcctgagctccgcctcctgtcagatcagctgcggcattagattcttataggaacacaaaccctattgtgaactacacatgctaggatctaggttgtgtgttccttattataatctgactaatgcctgaagatctgaggtggaacagtttcatcctgaaaccaccccctcaccccccatctgtggaaaaattgtctttcatgaaactggtcccctggtgccaaaaaggttggggaccgctgatttagatgatagctgattagatgtagaagatgaggccagaagctgggcgcagtggctcacgcctgtaatcccagcactttgggaggcctaggcgggcggatcacgaggtcaggagattgaaaccatcctggctaacacggtgaaacgccgtctctactaaaaatacaaaaaattagccaggcatggtggtggatgcctgtagtcccagctacttgggaggctgaggcaggagacaccagcctgggtgacagaacgagactctgtctcaaaaaaaaaaaaagaagatgaggccaggcacagtggctcacacctgtaatccaagcacttccagaggcggaggtaggaggacttgaggtcaggagtttgagactagccttggcaacatagtgagacccctgtctttacaaaacggcatggtggcacatacctgtagtactcagaaggccaaggtgggaggatcgcttgagactaggagtctaagactgcagtaaatcatgtttgcaccactgcattgcagcctgggcaacagagcgagaccctgtctcaaaaaaaaaaaaaagaattgctgggtcatatgataactctatgtttaacgttttgaagaactgtcatattgttggaataacgtttcaaagaaatatttccattgtcttttagtgtcttccatctgaaattgaagtgaaatacaaaatggctgaatgttatacaatgctaaaacaagataaagatgccattgctatacttgatgggatcccttcaagacaaagaactcccaaagtaagttgaatgtttatgtgtttttctcctcagctctcctaaccctgctccctctctccatgttttctcatgcattaaggagtccgtgtgaacattttacccatgattctaattctcattttcttcctcttcatggagtgggggtgggggaccctgaaaatccagctgatgaaaatgatagctggagaatactacacatgcttattctttgttttttcttttttattttttatgtttaacttaatttaatattttttgagacagagtctcactgtcacccaggctacagtacagtgttgtgatcctggctcactgcagcttcaacctcccaggcttaagcaatcctcccacctcagcctcccaaatagctgggattacagttgcatgctgccacacccagctaatttttttttttttttttttttttttttgagggggaatttcactcttgttgcccaggctggagtgcaatagcatgggggctcactgcaaagttgcccaggctggagtgcaatagcatgggggctcactgcaacctccatctcccaagtacaagtgattctcctgcctcagcctcccgagtagctgggattataggcgcctgccaccacgccaggctaatttttttgtatttttagtagagatggggttttgccatgttggccaggctggtcttgaactcctgacctcaggtgatccgcccacctcggcctcccaaagtgttgggattacaggcgggagccaccgcacctggccaattttttttatttttggtagagayaaggttccactgtgttgcccaggttggtctcaaactcctgggctcaaactgtcctcccactttggcctcccaaagtgctgggattacaggtgtgagaygccactccaagcctattttttatttttgttttgttttttttgttttgagacagagtcttgctctgttgcccaggctggagtgcagtggtgcgatctcggctcattgcaaccaccacctcccgggttcaagtgattctcctgcctcagcctcctgggtagctgggattacaggcacccgccaccacgcccagctaattttttttttgtatttttagtagagatggtgtttcaccatgttggccaggctggtctcgaactcctgactttgtgattcgcctgccacggcctcccaaagtgctaggattacaggcgtgagccaccatgtccggctattttttttttttttttttttttgagagggagtttcgctcttggtgcccaggctggagtgcaatggtgcaatctcagctcactgcaacctctgcctcccgggttcaagcagttctcctgcctcagtctcccaaatagctgggattacaggcatgcgccaccatgcccaactaattttgtaattttagtagagactgggtttctccatgttggtcaggctggtcttgaactcccgacttcaggtgatccacccacctcggcctcacagagtgctggggttacaggtgggagccaccatgcccggccaattttttttttcttttttttaaatagagatggtctccaccatttgcccaggttggtcccaaacttctgggctcaagttgtcctccccccttagcctcccaaattgctgggattacaggcaggagccactgcacctggcctccttgtgtttgtttttgtttttaagtgaaagtgagtttattaataaaataaaggaataaagaatggctactccataggcagagaagactttgatatttcttattataggaaataatgatttatttgcaaaacacttccaggtggcaaaaatacttttttagaacttcattttttgccttccataggtgtacacatttggtaatgggggtggttttattcctttgttttgaaaattaatactgtaagattcttttatccttatttatgtgtagaatatgtctttgtgtttgatttggcagcatattatagtgaagaaaacacctttaactaaaatcaaaagatctggtgtcggctgggcatggtggctcatgcctgtaatcccagcactttgggaggccgaggtgggtgaatcatctgaggttgggagttcgagaccagcttgaccaacatggagaaaccccgtctctactaaaaatataaaattagccgggtgtggtggcgcatgcctgtaatctcagctactctggaggctgaggcaggagaatcgcttgaacccaggaggcagaggttgcggtgagccgacgtggtgccattgcactccagcctgggcaacaagagtgaaactccatctcaaaaaaaacaaaaaaacaaacaaaaaaagatctggtgtctagtttgagtttaggtgcatacaagctgtgtgcagtgtgaacttgggcaagttaccaatttgtgagctttactacttttttatttataaaatgagaagaatagtattttttctgttacttttataaataccaaataaattcatgaatgtgagaatatatcagtatttaatattctaataatactgtcatgtctcctgccttgctcattttattgaaaaactgttttgtgcaacttgtgcttaacaataaggaattttataggtaaaatgacaggtgcatcctcctgcctttaaaagatacgaaatctaagcagtaggggcctggtgtattttagttagtgctgcttcatccaagtcttgctgaactttaaaagtaaccaaacttgatgagaacatgtttaagcacctcctcatattaaggtattatttactattttctgagtttttgaagctatttcttcagtatgatggtggctgctattaaaaacacttgaaagtttattatgaattaacctctctcatcataagcctggatgctgtatactaaatcctgttctggtaacctatgaaagtcttctcttactccaagaataatcttgttgcacagatgaagaatgtctgctgcaatgctcaaggtatcttccttttgtaagaagcctttttttttttttttttttttttgtgaggtggagtcttgctgtgttgccaggctggagtgcagtggcacaatcttggctcactgcaacctccacctcccgggttcaagcgattcccctacctcagcctcccgagtagctgggactacaggcgtgtgccaccacgcccagctacttttttgcattttagtggagacggggtttcaccatgttggccaggatggtctcgatctgaccttaggtgatccgcctgccttggcctcccaaagtgctgggattacaggcatgagccaccacgcccggccaagaagccattttaattataaactttgaaggatactattccttactttattagaaatataccataatctccttcataatgacctgtggatatttgtaggacttttttttgaaaatagtaatgttaaagcatctcagctttatagcatccactgcttgattttcattgccatcattcttagagcacctgtatgagtctgcatttgtcagcagtacatatccttcattctgtagtgctcttacagctaggagcaaagatgtgtgcctcaaacataaacctataacatttacagtttttctttcttgtctgttagggagttaactggcttctcagtctatgtaaaggacaaggaagtgagtcaaaatgtgtctaaatgaatgtctgttaatatatggtaaacatcgccacatattccctcacattttaaaggaaaattccagtgttagattattaaatcttggtaaatcttcaccttttaagagtaaacataccaacatagaatttcttactcagtttttagaaaatgatgactgcttgtgtttataactggtggaatgtggctttatgatgtttttaagtgagkatctatttttaaaatagttgactttttttgtttgtttgtttgagatggagtctctctctgttgcccaggctggagtgcaatggcatgatctcagctcactgcaacctccacctcctgggttcaagcgattctcctgtctcagcctcctgagtagctggtactacaggcgcgtaccgctgcacctgcctaattttttgtattctagtagagacggggtttcaccatgttggccaggctggtctcgatctcctgacctcgtgatccacccacctcggcctcccaaagtgctaggattagaggtgtgaaccactgcgcccggccaataattgactttttcattaggtattactcaaaactcattcttttaaagtgacagtcaagtagcttaaaggaaattttgatatttgttgagaaagatagtccatcagtcatagtttgttaatataaccagcagtcaagaaaggatcttaaatttaactttttattctttacaagtattgacatcaatcctggagttttccttttaagtatttttctttgcattttcaaaatagtagcctaatatggaaaatctgaggccaagtaaaaaatagttttatttttagtatttcattattccattgtttgaattagtgtgaatcaatgctatattagattgttttatataatgtaggtctataattggaacagatgttctttatctttagagccactctttctataaatatctggcataccaagccacagttaaatcgaagagattgggggttgaccttttttccttttgtgccctcacattgactgcttccttaggttaatgatctagcaaatactgttgtgtttaaaatctactaattttgccagacacggtggctcacgcctgtaatacccagcacttgggaggccgaggtggttggatcacnnnnnnnnnnnnnnnnnnnngaggctgaggcaggagaatcacttgaacccaggaggcagagcttgcagtgagccgagatcgtgccatcggcactctagcctgggtgacaagcgtgaaactccgtctcaaaaaaaaaaatctaattttaaattggaatattgtgtttatctgtgtactattaggaaggtcttttatcacttgcctataacttctacattcttaggaacttttagattttctggctttttttttgtttttgtgggttttttttgttgttttttgagacggagtctcgctctgtctcccagtctggagtgcagtggcacgatctcggctcactgcaagctctgccttccgggttcacgtcattctccttcctcagcctcctgagtagctgggactacaggcgcccgccaccacgcccagctaattttttgtattttttagtagagacggggtttcactgtgttagccgggatggtctcaatctcctgacctcgtgatccacccacctcggcctcccaaagtgctgggattacaggcatgagccactgcgcccggccagaacttttagattttctcatttcccagttgcatgttaggtaggattattttaatttagctttacaaagttacatatttaaattacgctaaaatgcagctgtctgcactcactggatttaaatagtgtagctgatttttgtagcattactttagtgagttagtacctacgggccaaagccttaagtgttagaaaggctagagtctagccacaagtcgaattgtcaaagaaaagccaagtattatacttctttatctgtctttctgtatcatttccttattaggaaaaactgagctgatccttcttaactagctatgtcragagtttctcactttcttatgtgagatagttcatcttctgttttaagatcaagaaagaatcaagttaactagcgttctctaccatttcttaaatgaatgttattccagtttccagagggcagcgtcttttgttcagatattactgggccttgtgggaaggtaatgtgactttcctcttagggaaggcaggagctagggaaaggaagggtagtaatttcttttcttttctttttttttttttttttttttaagatggagtctcactctgtagcccaggctggagtgcagtggcgtgatgtcggttcactgcaagctccgcctcccggtttcacaccattctcctgcctcagcctcccgagtagctgggactacaggctcccgccaccacgcccagctaatttttttgtattttttagtagagacggggtttcactgtgttagccgggatggtctcaatctcctgacctcgtgatccacccacctcggcctcccaaagtgctgggattacaggcgtgagccactgcacctggccaatttcttctttcttttgaagaatggggtcagtctgcctttatttgcacagggttgtgggtagattttccagtaaaaagtaaataactggtaatgaaaattaggactttttcatggtgagagattttctttgcaatatacrcttattttgctatctgttatttgtgtttgtacagataaacatgatgctggcaaacctgtacaagaaggctggtcaggagcgcccttcagtcaccagctataaggaggtgctgaggcagtgcccattagcccttgatgccattctaggtagagatatttcctgcctgttttcatggcatgtttactgtcaaagatartagttctcaatcttgcctgtacattagaataactttattttttttaaaagttcccctsmagagagtgatttagtaggattcctgttgtcacatattcaatcaagaaatacttaattatggtttttggccgggcatggtggcttacacctgtaattctagcaccttgggaggctgaggtgggtggattgcctgagctcagcaggtcgagaccagcctgggcaacatggcacaaccccgtctctactaaaaatacaaaaattagccaggcatggtggcgcgtgcctgtaktcccagcttctcggaaggctggggcatgagtatcgcttgaacccaggaggcagaggttgcagtgagctgagattgtgccactgcattccagcccagggggacagaacaagacactgtctcaaaaagaaaagaaatactaaattatggtttttctctcatgcatcgctcagaatagggaagcagttgccttttagccaagggaagatgtagcccgttgctccttgcatgtggaagagagatatcgtgccttactttctttcttctgctttctgttggtttaggcttgttgtccctttctgtaaaaggggcagaggtggcatccatgacaatgaatgtgatccaaaccgtgcctaacttggactggctctctgtgtggatcaaagcgtaygcttttgtgcacactggtgacaactcaagagcaatcagtaccatctggtgagagccacaaagttaattcagtgttcttgaggccctttgcttgtctggaagtctgatgtatctgaagtagcaaaaagaaaaatgagatgctttgctgttggtgctgcagccagtctctgggatgtgttagtcttttatactgaatggtcccaaatgtaatcatgtaatcatctctgttggagacctgtaaaaatagaaatctgactgagtttagctctgtgcctgcacaggtagtaacccttgcaaagcaaagcaggctaccttggtgtgtcatttttttttttttttttgagacaaggtcggtctctctctctctctctctctctctctctctctctctctctctctctctgtctctctctctctctgtctctctctctctgtctctctctctctctgcctctctctctctctctgtctctctgtctctctctctctctctctctctgtctctctctctctctctctctctctctctctctctctgtctctctgtctctctgtctctctctctctctctctctctcccaggctagagtgcagtggcgcagtcacagctcagtgtagccttgacctgtcaatctcccgggctcaaaccatcctcctgctcagcctcctgagtatctgggactacaggcgcatgccaccacacccagctaatttttgtatgtttttgtagagatgggatttcaccatgttgcccaagctggtcttgaattcctgggctcaagtgattctcccacgtgggcctcccaaagtgctgggattatagacgtgagccaccatgcctggccttggtgtatcattcttcagcctggaagaaaatcattttgcactcaccagaagcttggtttattgcagtgtctaacctagcttgcctgcttaggactagggattttctttatattcagataaagttcaaggacaagaagagacttgggcttgtgttatgcaaagtcgtttacttgagtaataaataggtgtcacttgtgaatgacattacctttaacaccatgtagcgtatgttgtgttctgaagaactgcaaccacagagttatttgttggtactgagagacttctgctttattctttgtttttgctatcctgtcctatataactttttttaaagtcataagcttaaagttttttattacgaagaattttatatttatgcaaaagaaaatagtatctgtatgaccaatcatccagattcagcaactaagaggatttataatagatttaaaggttcaatgtttaataaatatcttaaagttcactagagaaaaaatccttattgcgagataacgtggacctattgggaagcttggcagatctgtacttcagagctggagacaataaaaactctgtcctcaagtttgaacaggcacagatgttggatccttatctgataaaaggtaagtaattcttggggcargaagacagtggctgttgttgggggggatcagagataatagggagaatatgcagcattaatactcgataccaagtttcatagaaatggtgtataaaacttatactagtcttttactttttttaggtcatgacacatgtctctaacgcttaggtaataccatttgagcagctgtttttgcttgaattcaagtgtcttctccccacagatcattatttggctttttttcttttgagggggtcatagctcctccttatgacttataaatttatggtgtgcctgactgagaatttggatggcatccctaaaaccataatatccttttagggaattttgttttgccatgtccttagtataattaaaaaggaataagaaagggataaggtgattaaaggcagtaattaggcgtgaacaacagaaaaatcactgatcttgaaaaagattgcaggtgaagggtaatcttcacagggacctccaacagatggcagttaggacactggcagtgagttctcaggaatagtgggaaataaggtcagatagatatgctgtctatttgtaaaggtccaaaaaaggccatcagaaaaacagggccttgtgacaataaacagtcttatgagctcttaagccaggggaatgatggagctgggaaggggccatcccaagcgtttagatgaggaagcagatctagaaggatggatttgtttgcacaagatctcccctcacctcaagtgcttattcctcttctccaagctgcctgcacccatgatgaaaatgatgttttagaaatactagtctggcaacagctggcagcttggaatggcaatggcagcttggaatctcagacccaggcccaggggctagcaggagcattgcagtaatcttggcttgagaggaattttcatgggaatctgaagggatagcaagggatggaagagaatggtggcaagagatgggtaacagtgagcataggtccctttttatagaatgtgggtgagaataaagcgggggctgcggagaggcagtgattttttatttgtttgtttgagacggagtttcactcttgtcgcccaggcaggagtgcagtggcacaatctctgctcactgcaacctccgcctcctggttaaagtgactctcccacctcagcctcccgagtagctgggattataggcgcccgccaccacacccaactaatttttgtatttttttagaagagacgggggtttcaccatgttagccaggctggtctgcaactcctgaccttaggtaatccacccgcctcagtctccctaagtgttgggattacaggcctgagccactgcacccagcccgaggcagtgatctttaatgaactgcattctggatagaactacaagcttttttctggaataggccaactttttctgagactgattggcttttcagcagtgtatttctgatggtctagaactctgggaagagagaccttagttgatgccttttttgggccttttctggttgggttagggtagctgtgtatcacaccacaggatagaaggacaagcacttcctgaaaatagcaggctttcaaattgtgaggtaggttgttctgctcctttggttttttgttttttttgtttttttttgttttttttttgtgagacagagtctcacaggctggagtgcagtggtgcaatctcggctcactgcaacctccacctcctggtttaagcaattttctgcctcagcctcttgagtagctgggattacaggtgtgtgccaccacgcctggctagtttttgtatttttagtagagatggggtttcactatcttggccaggctggtcttgaatttccacctcggcctcccaaagtgctgggattataggcatgagtcaccgtgcccggcctcctttggttttggttttggttttgttgttagagacagggtctcactctgtcactcaggcgggagtggcacaaacatagctcactgcagccttgacctcctgggctcaagcaatcctcctgccttagccccctgagtagctgggaccacaggcatgtgccactgtgcttggctaatttttttttctttctattttattttactttattttattttatgttttagacatagtcttactctgttgcccaggctggagtgcagtggtgcaatctcggctcactgcaacatccgccctctgagttcaagcaattctcctgcctcagcctcccgagtagctggtattacaggcgcctgccactgtgcctggctaattttttgtatttttagtagagacggggtttcaccatcttggccaggctggtacttgaactcctgacctcgtgatccacctgcctcagcctcccaaagtgctgnnnnnnnnnnnnnnnnnnnnnnnnnnnnnnnnnnnnnnnnnnnnnnnnnnnnnnnnnnnnnnnnnnnnnnnnnnnnnnnnnnnnnnnnnnnnnnnnnnnnnnnnnnnnnnnnnnnnnnnnnnnnnnnnnnnnnnnnnnnnnnnnnnnnnnnnnnnnnnnnnnnnnnnnnnnnnnnnnnnnnnnnnnnnnnnnnnnnnnnnnnnnnnnnnnnnnnnnnnnnnnnnnnnnnnnnnnnnnnnctcagcctcccaaagtgctgggattacaggcatgagccaccgcgcctggcccttcttttttcttttttttttctttttttttttttttttttttttgagacggagtctcgctctgtagccaaggctagagtgcagtggcacgatcttggctcactgcaacctccgcctccctgattcaagcgattctcctgcctcagcctcctgagtagctgggattacaggcacacgccaccatgcccagctaatttttgtatttttagtagagatggggtttcacctgttagcctagtctcgaactcctgacctcgtgatctgccctccttggcctcccaaagtgctgggtttacaggcatgaaccactgcacctggccacttggctgatattttaaaatttctttagagacagggtctcaccatattgcccaggctggtcttgaactcctgggcccaggtgatcctcctgcctctgccacccagagtgccaggattacaggtgtgagccaccacgcccagctgggttttgcattttctttttttgagacagagtctcagtctgtcacccaggcagtgcagtggcgtgatctcggctcactgcaacctctgtctccctggttcaagtgatcctcctgcctcagcctcccaagtagctgggattacaggcgcgtgccactatgcccggctaattttttgtattttcagtagagatgaggtttcaccgtgttagccaggatggtctcgatctcctgacctcgtgatccacctgcctcggcttcttaaagtgctggaattacaggtgtgagccactgtgcccaacctgggttttgcattttaatagtcactttgtaggaaactggaaatagtagttggaggagcctgtgatggtggaaagggcttagcccctgcaggagctggggcctcagcatggggtctgatgttgggtgctactcctgtatgtgggacccctgcttctcttcttaaaacacctcttctcactatgtccttctcttctaggaatggatgtatatggctacctactggcacgagaagggcggctagaggatgttgagaaccttggatgccgccttttcaatatctctgatcagcatgcagaaccgtgggtggtttctgggtatgattatgcattctcttttctccccagttgtcagtagattaagagataatggttgctcttgaagagaatataaattgaaagcacaggtttaagaggtaatcacctggacaggcatggtggctcrtgcctgtaatctcaacactttgggagactgagacaggtggattgcttgaacccaggaggcagaggttgcagtgagccaagatcgtgccactgcactccaggtgggcggcagagtgagattttgtctcaaaaataaataaataaaaataaaaagaggtaattacttgaggccagaaatttgagaccagcatgggcaatgtagcaagaccctgtctctataaatatatatatatatatatatatatatatattttttttttttttttttttttaaaaggataatcagccctggattcaaataatagtttatgactctggatgcattatttacctatctaggtctgtattctcatttggaaaatgggctaataacctctccttctagggttaagcattaactgagttggtgaatgcattgtgcttagtactgagccatcagtgatggggccagaagatgctcctttgtttattaacctggctttacaaattctctgaatgcctctctgctaataactaatatccagatcataggttctttttcataatttttctcttccatatcaagatttccccttaaaaataaatagtggattttttggtttgttttgcttttctactaatatcttaggttaaaactataagtgtggtttggaataaggattatgttcagggccttcaatatgatttttggatcaactttctttgtagtcttctcttggataacttctggggtttttgtgttttttttttttttttttyctccagctgtcacagcttctatagcaaacgctactcccgggccctctatttaggagccaaggccattcagctgaacagtaatagtgttcaagctctgctacttaagggagcagcacttaggaacatgggcagagtccaagaagcaataatccactttcgggaggccatacggctcgcaccttgtcgcttagattgttatgaaggtaagaaagaaaacataggtgaatggtgtgaatccgtgggtgtggcagcagccctcagatggaaggtttcattaggccagcacttcccaaactctgttagaataatctggggaagctggccggacgtggtggctcacacctgtaatctcagcactttgggaggccgagacgggcagatcatgaggtcaagagattgagaccatcctggccaacgtggtgaaaccccgtctctactaaaaatacaaaaattagctgggcatggtggctcacacctgtagtcccagctacttgggaggctgaagcaggataatcacttgaacctgggaggcggaggttgcagtgagccaagattgcgccactgcactccagcctggcgacagagcaagactccatctattaaaacaacaacaacaacaamaaaaaaacatcatccggggaagcttttcaatatcctgacgttgggtctctccagtgtagatggaaatacatggaattgggaatagacatcgatatttttggaggtccccaggggttaccaatgtgcagacaggtttgggaaccactgcattaggcattttacatttatttagggctttcactggatttgtcaccccatactttcataatccattttttctgattttttttctggtttttggtgagggtatagttgggatggggttttttttttttgtcctcccaccgctcgcccccatccagtgtggcgtactcattaatatgaatctctctgtgtcagacaccatgcaagatcacttagtttgcctattttttttctcttactcctcttttttttgagacagagtctcgctttgttgcccaggctggagtgcagtggcatgatctcggctcactgcaggctccacctcccgggttaatgccattctcctgcctcagcctccccagtagctaggattacacctggctaattttttgtatttttagtagagacagtgtttcaccgtgctagccaggatggtctcaatcttctgacctcgtgatccgcccgcctcggcctcccaaagtgctaggattacaggcgtgagccaccgtgcccgggtcctgttttttttttttttttttgagacagagtctcrccctgtcacccaggctggagtgcagtggcatgatcttggctcattgcaacctccaccttccgggttcaaaccattctcctgcctcagcctcccaagtagctgggattataggcgcccaccaccacacccagctaatttttgtattttttagtgagatggagtttcaccatgttggccaggctggtctcgaactcctgacctcgtgagctgcctgccttggcctcccaaagttctgggattacaggcatgagccaccacaaccggcctattttttttatttttatttgagatagagtctcactctgtcacccaggctggagtgcagtggtgcaatctcagctcactgcaacctccacttgccgggtttaagtgattctcctgcttcagcctcctgagtagctgggattacaggcatacaccaccacacccagctcatttttgtatttttagtagagatggggtttcgccatgttagccaggctggtcccgaactcctgggcttaagtgatctgcccaattcagcctcctaaagtgctgggattacagacgtgaaccactgtacatggcctgttaggcctattctttttcgtggccatcttaccttgggccagagttagtactcgtgggataactccacatccatatgatagtgttggctgtgggaatgggtctgttcattgtgacctccagagtgggcacaatcagggtccaactttgttttgttatgtaatattttaagttcatgtgaattgaccctgggagttcaaaggagctgtgccagtttcagcaacgtttggtgactcagtcacagacattaaaatagatcttacaagatgcagttcctccaaaacatatttttataagcatttaaaaataaacctaggagtctaggagtgatttgctcttaacaggaagatgagttcaaatttgagaaataaaatttggatgttgggaaagagaacaaatctgcttatatagccagagagctatgcctctggatttgttgagggggaaagagtattgtctttgttctgaaagaagctctagcaaaccaaccattgatttcagattaacttcttgatcctgaaactgtaacttccctgtcttcccagctgctgttaatcatgttaattccattatactgcatgcctatttcaccagagctcagggatgcggttgaatagtccgtcctataatatttggacagcggatgtttcccagttggccagtgaggcttcttaagctgccatttggagatttaggtcagggcaactctgactacaccctttgatatttcttacagtttccagttggagcttccttcttttgctggtagagatttaggttaggcaagtgcattctgtttttttctgaagttccagtagggctttagcagggaagtaaaactattcagtaagtaattgcaaacaactgtatgtggaatccaacatgttgcccttaagagttaggtaattggctgggtatggtggctcatgcctgtagtcctagcactttgggaggctgaggcgggtggaacacctgacgtcaggagttcgagaccagcctagccaacatggtgaactaccatctctactaaaaatagaaacaaatttagccaggcatggtggtgcacgcctgtagtcccagctacttgggaggctgaggcaggagaattgcttgaacccaggagacatgggttgcagtgagccgagatgtcaccactgccctccagcctgggtgacagagcaagactccatttcaaaaaaaaaaaaaaaaatagttagagttaggtaatttctggttaagtaaccatagtgtgtggaagggtgtgcatgaatgttataaatgctgctagggtggaggagtatgcagagaaaatctgccaaggattgtgtgggtttggggttttaagctgtttttttgttttgatgagcactttgtgccaaaaagttattcctctgttctcctcaacttactggcatgaagagttgagagttgactcttctcaaggtggcctcctcatagggcgtctcgctgtgggtgtggaaagaggcaagggctgccagttgcagtctgtttggtgcatgtggtaagtactgttcatctcgtttagggaagccctcagcaagtgccttttgagacagctgttacgtttcaaataaaagagtctttctccctaagttgcttgacaataagtcctttatttgtcaaactgtaaattcactttaagactctaggagccaggccaggcactgtggcttacgcctgtaatcctaatactttgggaggctgagctgggcggatcacctgaggtcaggagttcgagagcagcctgaccaacatggagaaaccccgtctctactaaaaatacaaaactagccgggtgtggtggtgcatgcttgtaatcccagctactcgggaggctgagggaggagaatcgcttgaacccgggaggcggagattgcagtgagccgagatggcgccattgcgctccagcctgggcaacgagagtgaaactcygtcgcaaaaaaaataaataataaaataaagaccctaggagtcttccatcttaaacctagccctacaggtgaccgaatgcagctggagaataactgcttgttaagaggcagcaaaaccttgggttttgttgggaacatcatctctcactactttgatctcttggccatatgacagactaatcattagtgtcgcatttattcttccagtggtcagatggggtgctcacatgctgcaggttccttacatgtgcttgtttccttccctaaactgaaggtgcctttgaaggcagtctttttctacatccatcaagttctctggggaagagcacttcttagctattccatcaacactcttgccagtctaatctcaccatcagtttcccgtggcctgccctttgtnnnnnnnnnnnnnnnnnnnncatcagtttcccgtggcctgccctttgtctgaaactttgaaggttagcaatttggagagctgtcagcagtggaagcatgggttggaatggtaatggcattgaatgtcttcacgtgttttacttttttcaggtcttatcgaatgttacttagcctccaacagtattcgagaagcaatggtaatggctaacaacgtttacaaaactctgggagcaaatgcacagacccttacccttttagccaccgtttgtcttgaagacccagtgacacaggagaaagccaaaacattattagataaagccctgacccaaaggccagattacattaaggctgtggtgaaaaaagcagaactacttagtaagtgtgtcttattttctgtcctgttcatcattaatttttataaaacctgacctcagttggagccccttgtcccagctagttacagatgactagacaggtgtgtgccttttgcagcaggtctgagcctgcttggattggtttatatttagcccaaccaaacgtagctggcttagatctgcttggcttggttccaaccacctataattggttggtatctattcggctcactaattttttttttttttttttttttgagacggcatcttgctctgtcacccaggctggagtgcagtggtgcgatctcagctcactgcaacctccgcctcccgggttcaagcaattcttctgcctcagcctcctgagtagctgggactacaggcgtgcaccaccatgcccagctaatttttttattttttattatttttttttatagtagagatggggtttcaccatattggccaggccggtttcgaaatcctgaccttgtgatccacccgcctcggcctcccaaagtggtgggattataggtgtgagccaccgtgcccagcctcggctcactgttatctggtttgagttgtcctgaattagttggagctgaatataactaactgattttagccattttgagtggagctatctggatgattttatgacttcccgtttggcccttttttttttttttcagtcctgatttatgataaactcataatttggttcattgaatttgggctagttggcaaagcagtttggctttttaaagttaagagcccatttaaaacattataattcaaactgcaaatttcttttttttttttttttttgagatggagtctcgctctgttgcccagactggagtgtagtggcacaatcacggctcactgcaagctccgcctcctgggttcaggccattcacctgcctcagcctcccgagtagctgggactacaggcacctgccaccaagcccggctaattttttgtatttttagtagagacggggtttcactgtgttagccaggatggaaaatttcttaactgaatagggcttcaggtgtgcttgccctcgctttgtgttgcaccagtgttctcttgaggatgtctgcaaagagatggtcagaatggtagttgtggtttttttgtacatgacttaagtgagggtcttttttattcccccaggcagagaacagaaatatgaagatggaattgctttgctgaggaacgcactggctaatcagagtgactgtgtcctgcatcggatcctaggagatttccttgtagctgtcaatgagtatcaggaggcaatggaccagtatagtatagcactaaggtaggcactagcctcccttgggggaaggccactgaggagggtagaggaggcagtgagctktgtcacaggagttatggaaacacacacacactttgtgtccatggttgaaagcagaataataatagtaatggtagaagagttatttgtgaattcatgacttctaaaaattttttcttaaaatatattaacaacattagagaactgtttcactcataaccatcccacaccactataacatctgtgttcatttgtatagctcatcttctgtccttgcccacacacacatatttttatagggctgtacctagtatatattttatattcttctttttcaaatcaaagtattgtaagtactttcccatgtttctatctactgtagtcattaagaacttgaggtctgaagttttgaatactaccttcaccacctgtgatcttgggcaagttactaacacatttccttgtctatatctagctaccttattagatattaaatgatcgaatgagggttaaatgattatttcatgtaaagctcttagccctgtgcctggtacatagtaaatgctaaataaatagtggtattcttactgtttaatacagaagtggtttctttgagggttgtctgtgtgtctgtaaggttatggtgaagggctgtctttaatagagtctgatcacattcaattgttcagcacacagttgagcaccacttgtgtgcctagcatctcagtgacaactggagatgctatgtttcgggagctgtcagtctcagacatgcagactggccatgccatgtgctaagggctttcatagtagtctgtagaagggaaggtgggagtccagagggcaggagccctgggtatgggtgagagcttcagagtacaggatgtggaaggcttcaaccaggagacgaggagatgttacagatcggtccgcatttatatcggtagaaacggtgccaacatgggttttagctgctttttagaatctcagaagcaagtgagaaaataaaatatcagacttccattagaggtggggtttgctaggcgtgggacgcctgctggcttgggtgatggtcactaaggcaagaggaaagattgcttaggaggcaaataaatgaatgttctagaggctctgaactttgggggtgggggtggcgtatgtactgacactcagctgctaaatgtgaatgcttgggtaggggtagccttgggtcctggggtctgacctaggtgtttacaagtctgttccatggtacagcgtgatgtttttggttggctcctgaaatgctgctatgtttaattacatcataagaacatgggayacctatactcagagaaattcctattttttgtaaccctgtagctctaaaacccaactttctgggaattccatttgaatttacctggtaatgtttgtttgccactttttcatttgtgttatctggtagccgcctctagcagaatgctaggggtaataggtatgaaaaagtttaagaaatttgtggagaaaaactcaaattgagaactctraaaattaggaagagactcctttttgcacttctggtggtggactccctcaacccagccttggaagcctgagttgtttggagaggccaggctttagcacattttttgggactgtgtggtcatttcactgccgggccagggagatgacgaatcagccagcaagagcaaggcagagattcaggcctctcctttgttttgttgtcccctagtttggaccccaatgaccagaagtctctagaggggatgcagaagatggagaaggaggagagtcccacggatgccactcaggaggaggatgtggacgacatggaagggagtggggaagaaggggacctggagggcagcgacagtgaggcggcccagtgggctgaccaggagcagtggttcggcatgcagtgagggggcggcagctccatggccgcagtggcctgccctgctctgagcacttccgtggactgaaggaaccgtaggagcctgctctcagaaggacaatgattcagcatgtgattgcagcaggggtctctgccccctcgctcccaattcctagtcgtgacttcatttctaaaacagagcctgaccaaccttccatgtatctccatcctcccctgctccagccagggaggactgagggagtgccccgagacccacgcacatgttggggcttctgggccaagagtactttttatataactaatttctaaatccaaaagctcaaggaatagacagtgttctgtgacatggattggtttgaaggagttacccaccatcccagcacgataatgtcatctcccaagttggatggcagcacgatctggccctagggagcttcctgttcccagaagtcattgtcctgggctatccagatgtccctagtaaatcttgcttccttctgcaatgttagtaatgccttaagctgacagttgctattttgcagaacagttttcctctttgcttagctagtaacttgcctctgagcctgggctgatctgagaaacaggtgtgacaagagcatgaaccagaggtgcacctggggcagttccctaataaaactggtttgtacagtcatggtgttggggtgatcagaatggaagcccttttcaaaatagactcttagtatttttgtcttattcgcaatgcattgattcagccccagaattatttgccagaaatagactttcttcccctggtgttgggagccaggagggttggaaagctcaggaaccctgagctggttcatctgtttgcatattgggtaggttaatttccctggagcctgagagtctttggccagatttcagctgcgtctgcctggctcttttgctgcagctgtgagattggggtctggttccagcagtctgtcactggtcagcctgagtatcacaccctgagctctggggctgggagtttcttcccacaccctctcccttgtgccttaagttgcgatggctctgagtatacaattaatcggaggtgaggggtgggtgtcacagctaatcccaaattcaaaaattagtccaaggtgctgcaaaatataaatttgatgtcagtagaaagtcgtatcctaaaatgtaaaaactgtaagtgtacagtagttaatgagctcagaacatctgataactgcaatttaaaatgggcaaaaagtttctatgagtctttcagtctaagacccaaagcctgcgcaacatcacttgatctgagccacttctaaagagacatataaggctaggcgtgctcacacctgtaatcacagcactttgggaggccgaggcgggtggatcacttgaggccaggagtttgagaccagcctggccaacatggtgaaacccccgctctgttaaaaatacaaaaattaaccgggcatggtggtacacacctataatcccagctactcaatactcaggaggctgaggcaggagaatcacttgaacccaggaggtggaggttgcagtgagccaggatctgcactgcactccagcctgggcgacagagacagtgtttaaaaaaaaataaagccccacagatagttggggtcacaccaggtgagtgtgcggccagtagaagaagctgcctgccccttggcctaggcatgctgtccaggatgcagcctcacttcatgggcttcctcagctccatgacctgtcatactgtgatgagagagaggcgatgcctcttttcctttcccctgactccaggaggaagcccagccccaccgcgcaatctcatctctgcatggcaggctcaccaccgcactcacatccactggatcagggtcccagagcccaggccccatgcattgccctcagctggcaccctcccaccatccccttccttgacatgcccctcagccctgctgagagcccctgtgctctccaggctcctgcagcccagcacctgctaggacggatcctcattctctgcagctccagccccagggtgacagccaggttggaagaggcggctgaaggtgtgaaaccacctcacacgggatggagaaaacattcggtcgacatcaaagagtggtgctcagagggtgctgaagctgtcgcttggcactgccactgtcactctttcacaaacccaaaacctcaagggcagggagctccaggaggcagggacagaaccaggctgctcagccctgtgtctctcctgccgagccacctgcctggagaccaggcacctgaccaaggacagcccccaaatgcccagtcaccacaagttctttctgggttctggagtcccacacagccagtatgggggtgttttaaacagtcatttctccaccttccagattgttcagagaccacctgggtctaaaaagacccccctgcccctcagaacccatgggctgctggggcagttagctatgcagcccctgctgcctcctggggtgaggactaaatgagtccgtgcggcgttcagcacgtcaccctttgcgacatcctcacgggggaatgccagctggccaggcctccctggggagctgggggtggttctgcacttctggagccctctcgtctctgaagggccctcagccaagcagggaggcgggctctggagtcgaggtgagccttgccttcaacagaacctcccatttttcacttttcaacctctgctgggctccagggacctggtaggtatgtaccctactcatggctgatggcaggagctctccctgcagccacagctggggggccacactcctgcctctgaattccaaaaaatgaggccggcttttgcccaaatctgcaatccccaaactagagcatgcatctcagcgatgcaggttcccaggcccagcaccaaacttttattggaatccagaggcctggcccaggcccagtggtctgcagctttcacttcccaccctgacttcctattctatgcaggtgttccctggaaaagtattgagaaacctgcgagaggggagctcgaagttcccaacagctgcaggcctgaccccagagggcccttgggagttaactctgcagctgtccgtgggtgggaggaaccggcctccaaaggcctcacctgtggcttcctgcgttcccagccctacactggcttacctgtggcaggccagggcctgcgcggagctgcttcccagagcttaggtgagctgtccccgtgagcagctctctggggttgtgctcaggcctgcgttccctgctgacgacaggcagtgagtccagactccacatgaacctcacctcatcctccaggcacggctgtggccaggtcaccgggaagccctgcgctgggaggggccattgaggtaagtgccttactaaggttttccactttctgcaggagcctccctgccccagggcagcaggaggggcctcagttgccacctcccgtcttggggtgcagtgcaggtctgccgtctagacccctccaggcctgggcaaacagcacccccgcccaggccaccaccagcctggtccagagtgtagggttttctcagattgctgtggaaggtcattggcagcacagcacacggcaccagcaaggtcaggaacaaaccaagaagcccacagtgcagcctccacagcagccatgaaaagaaaatatgaattttaaagtaacagtgccactgtgcactgctggtgggaatgtaaggtggcacaaccactgtggagaacagtctggcgattcagaaattcaaacagtactactaccctaggatccagtgttccacctccgggtgtacacccgaagaagtgaaagctggaacgccaaaagattgcacgtccatgtccacgcagcactgtccacagcagcaaaaggtggaaacaacccacgtgtccttagatgagtagataaacaaaccaaggtgcgtctttcggtacaatggaatattactcagccttgtaaaggcaagtgacacatgctacaacatggaggaactttgaggacattattctaagtggtagaagccaatcacaaaaggacaaatgctgtatgactccatgaatcttgaggtgtgcctggcacagtcagattcataaagacaaagtagattagaggctgccaggaactggggggaaggaatgacttagtttctaatagggacagagtttctgcttagaatgcttaacaagttctggatatggtgcggatggttgcacattttatgttatatatgttttatgacaattaagaaatgacctgtaagcctgccatctggataactccagtaaacacatcttaatttatgtgaactatggtgtgtatttgtaatatatatgtgttacctaaagttacacatgtttaaaaaattcaggccaggtgcagtggctcacatctgtaatcccagcactttgggaggttgaggtgggcagatcatttgagctcaggagttcaaggtcaccctgggcaacatagaccccatgtctacaaaaaaatttttaaattagctgggcatggtggtgtgtccctatggtcccagcttcaatgcacacgggagctactcaggaggctgaggtgggaggattgcttgagcccagaaggtggaggttgcaatgagctgtggttgcatcactgtactccagcctgggtaacacagtgacaccctctcaaaaaaaaaaaaaaaaaattaaaccatggaaggcataaaattagaaatacatctacttcccaatccactgaatttattgtctctccccaaaataagtttctggttctacttttgtaaaaatagttttgtgcttttccttaactatatatattataaaaaatattctgccaggcacggtggctcatgcctgtaatcccagcactttgagaggccaaggctggtgggtcacctgaggtcaggagatctagaccatcctggctaacacggtgaaaccccgtctctactaaaaatacaaaaattagccaggcgtgggtggtggtcgcctgtagtttcagctacttgggagggtagggcaggagaatcgtttgaacccaggaggtggaggttgcagtgaaccgagattgtgccacttcacttaagctggggcgacagagaccccgtatgaaaaaaaaaatacgaggccgtgctgtgcacagggacattctgtgcagcgtcagtgcaccccttaatcatcagtactgcagaatccattctgcagaaggaacaatttccgcaacccttctgctactggtggacacttgttttccagtcttgaacataattatttcagtctgtgctgtcatgaacatattttgccataatattccaaggatatgcagaagtcaagttccttgcagtgaaattcctgggtctcagattgtgtgcattgacatgtctcatgggtgctgcccgattaccctccaacaataacaggtgcaagtgcctgtttgcctgcccctcatcagcaccactatcattaagtgctttcatttggtttttattgtttttaccaacctcagatttgatcagtactcccttgcttttatttgccttagctgctattcttttttctttcttcctttttttttttttttttttttttttgagacggagtttcactctccatctggcacatgattacaggcatgtgccaccatgcccggctgattttgtatttttagtagagacggggtttctccatgttggtcaggctggtctcaaactcctgacctcaggtgatccgcctgccttggcctcccaaagtgctgggattacaggcgtgaaccactgcacccgcctttttttttttttttttttttttttttttttttttttccctaaaacagttttgctttgtccccnnnnnnnnnnnnnnnnnnnnnnnnnnnnnnnnnnnnnnnnnnnnnnnnnnnnnnnnnnnnttccttaagacagtcttgctctgtcgccctggctggagtgcagtggcacagtcttggctcactgcaacctccccctcctgggttcaagtgattttcctgcctcagcctcctgaatagctgggattacaggcatgcgccaccgcgcctggctaatttttgtatttttactagagacagggtttcaccatgttggccgggctggtctcaaactcctcacctcaggtgatccgcgggccttggcctcccaaagcactggaattacaggtgtgagccaccgcaccctggcccctagctgctatttcttttctttatttttatttatttatttatttattttgagtcagagtctcactctgttgcccaggctggagtgcagtggtgctatctcggctcactgcaacctccacctcccaggttcaagcaattctcctgcctcagcctcccgagtagctgggattacaggcatgggccaccacacctgcctaatttgtgtatttttagtagagacggggtttcaccatattggtcagggtggtctcgaactcctgatctcatgatctggccgccttggcctcccaaagtgctaggattacaggtgtgagccatggcgcccggccccagctgctattttgtgagtgctcctctgagacaggccacgaggcatggcctttgcctacattaccacatctcagcctcacaccccctgaagttggagaggtagaattggccgctttcacagatgagtgcactgagtctcagatggacacattagctgttttcgtctgtccagagcctcctgccctggagtttcagtatggtcttaacggatctctctgcaattgtatcatatattctgttccagagaaaacagccacactaagcccgcctcaccgtctgttgctgcaggcctcagccttgctttgtctaaaggctgcagacagtctggcaaggacagcgcgtcacgacacagctctcgctggccacttaaatcttccagtgtctctctctttataaacaaccctctggtgacctcctttgtgctattttttttccttctttgggtaaattctcagcagggggattttggagtgagagtataatcttttttggaactttcaagggacctggctggcttgtcctctctgcgtggcaaacacatatgcccaggttagcccggcagccaccctgtctacccagggagcccctccgtgggcttcaggttaggggcaaaccaggagctctgcagtctcttgagcgtctgctccgcttcctcttgctggagct

SEQ ID NO: 94638 - DNA, 28139 bp, Homo sapiens
cctcagttccatgacgccaccccctccctccaaagactgggacagcgcctccatttttgttttggggaggaagggcaggggcttgcggatagaagggggtcaaaggaacggtgattatcacctgtgaggggaaagggggtgctgtcctccctccttcccttttcctcagcctgcaccccctgcaatcccccacctttcggggtctccccctccttgttgctaaggcccggaccgtcatcccagcaacagcctcagtcatgtgaccggcaatggcggcgctgacgagaggtaggtgagcccggcgccccccacacccaccgcgcgccccccgggccccgctcgcacccctcacgcgccccccgctcccccggcgccccctcctccacctcccctccccgcgcgcggctccgggctccccgctccgtgcccggccgatcatctttctagcaccctccagccttggcctccattcgggggttctgagggctgcgatcgggccgacatgcacccccacccggcggtggggatccgggggctttggctactgagggatgtggggagttggttccgggtcgggtcttggaggaggccgtggggggagggcgggagctgcttcagtggatgcccccagggacccttgcccatccgggctgtgcctccctctggcctctgtctggagggagagactggttccttgtccggcctgggttgccacagaggaatcacagacccaccctaaactggggccccgcctcccttttctgtgccagcaggacttggacctaggacacctaggtcctgggtcccccgtgatggggagagaagtgttgcatcgcggatagactgtatgggctgagactctagggttccattttcacttatgaatctcgaggtgcatctggccttgggggacgatgatggaggcatgaagggacagctgctccttcttggatcagtcaataaatggaggtcacactaatggcccttctttctgtttgagctgcatttggaagtgttgtggagacagccccgtagcccaatgcgaccagactcagggaaaacatcaggcccctccagctgagcccttgtgtgagccccgcccctccctaaatgccagacttgggagctgacagacagcactgcctgtgctgggtttaaaaggtgacaatgagaactttgttattgcaggggctgctgccactttgttcacatccttaacagacttcagcagaagggactgagttagctctcaaggaaggctccctggcaataggggctgaattatttggcaatgtggagcaggcgaggagttggggagcataggaaatattccggtccatgtgatctgagggaggtggcaagaagacctccacctgtgtgggcgttttctttcctgacttctcttatgtgtgccctaggctttcttgggggcctcagagctggggaagaaaggaggaaggttagcatgttgaagttccttcttgagcaacttggggagaagctgataatggaattctgcagagaagagaggagatggaaggggagtttttatttctgggttggctgaggggaatggtaacatttgccatcataactttttacccttcccccactcccagtcctggtcagctgagtggaaatagaaggatttctgctgccatcatcttccatgggctttccaggtatctcccccgcaagggatcctcaattttcacccttaaactggtttccttcattccatgttccaagtaatgccattcttagtaacctatacccaggtttctgtctctgttccatgggctgctgggttgggggccatgggaattgggagaaggggtttctcactttccttccatttttccgccctaccaggtcacacgacctacaagtagggagcagggaaagaagagtgagcctgcatgccaattctaagctcttcaggatcaaagtaagcaaaaaggaggggcaaagagtctccctcccctttaaacagcccatttttccccaagaggtgggaggggcaaattgtttctatgatctgggagaaatgacaggagaaacaagactgatacttggcttagatgataatatagctctggaaacttttttgctcttcagtgggttttgggtttggaagataaggggagacagaatatgaatttgggtgaagggttggggattaggctttgagaaaacagaggtaatagagggtttggaaggaacctgaagtaggaggcactgatacttgtcaaatggggaccccccaccctgagtccctttcaccctgggggcagtgtcgttcgtcctgtccagaatggcagcctgtggaggcacctgcaagaacaaagtgactgtgtccaagcccgtgtgggacttcctgagcaaagagaccccagcccggctggcccggcttcgggaggagcaccgtgtgtccatcctcatagatggcgagacttctgacatctatgttctccagctttccccacagggtcctcccccggcccctccaaatgggctctacctagcccggaaggctctcaaggggctgctaaaagaggcagagaaagagctgaagaaagctcagaggcagggggagctgatgggctgcctggctctggggggtggaggggagcaccctgagatgcaccgcgcaggcccaccccctctccgagcagccccacttctgcccccaggagctcgggggctcccccctcctcctccccccctgcccccacctcttcctcctcgccttcgggaggaggcagaagagcaggagagcacctgccccatctgtctgggggagatccagaatgccaagacattggagaagtgccggcattcattctgcgagggctgcatcacccgggctctgcaggtgaaaaaggcctgccccatgtgcggccgcttctatgggcagctggtgggcaaccagccccagaatgggcggatgctggtctctaaggacgccaccctcctactgcccagctatgagaagtacggcaccattgtcatccagtacgtcttcccgcccggtgtccagggggtaagaagaccatggcctgcccttaccctttggctttccccaagctctgacctaggaaaaccgggtgagggtgagtgtgcttgttagatgtgagacagtcttgctgtcttccactgtgccctcctactcagtgccctggacctaggaggtccccgtgaggcccagcctttccatccctgtgatcccaaggcacacgtgaaaatcagatatgagctaggaaaaaaaaaagcaaatcagatatgagaggaaggaattgcatattatttccttgatgaacacaaatactgtgctgacatcttggcagaggtaaattctgtggaggtggtggcttaggggaagggaggcacaataggaagggatctgaccaacccaacagagccaggagcatcactctgtaaaaacaggagtagtcaaggcctataggtgtcttcctgctggacaaagagtaatgtgcaattctggctgcagaggggtgaagaagctgcacagaagagtgatggaaaatggaacaagttagacagtggcagaaacattaggagtattttcaggtgaagggaaggctgaaagatagattattctgtcttcacatttttgctgagttgtctggagtgtagggaccagctaacttccatcacttctgagaatccatttgttgctgaatggagacttgagggattgagacagcagaaaaaatctcttaacacataaggattatgctctgaaacaggctcttgctgccgaggccgtataatctctccttctgtggaaagctgtcagcctgttgctgccccgttcgcattagctgggggtgctcagacagagactagcctggatgaccctcctctggcatctgggccttaggatgcctggctgctcactgcccactctgcttcaccttcctcccaggctgaacacccaaacccaggagttcggtatcctggcaccacacgggtggcctacctcccggactgccctgagggcaacaaggtgctgaccctgttccgcaaggcgtttgaccagcgtctcaccttcactatcggcacgtccatgaccacagggagaccgaatgtcatcacctggaacgacatccaccacaagaccagctgcacagggggaccccagctgtgcgacccctcttcatttcctttcccttggctcctcccctttgttccatttccactgagggacccaccaacccctcgctcacggagcctcctaactggagagaaccacttccaaactgttcagccatctcagtttctcctacattcaacctggtcctggtgtgcccagcttagcctacaaaaataagcagaactgggctaaattatcttggatttggaggtgtcctcccttaggggaggtggggaggtgtctgagccacctagaatgagggtgagcatggggataatagcaagttcaaacagctaacaaccctcaccctcatttctctttgctcccaggtttgggtacccagaccccacctacctgacccgggtgcaagaggagctgagagcgaagggtatcacagatgactgaaggacatcgcctttgccaaggcccctgctgtctgcctctactaggacccagcagaagcctctttctcctctctgccccctgccccccacaccacacctgtaggggacctgtctgactgggaagggagttccgagagggagggggcaatcccttcccccatcccccactggccaagtgtttcaatgcagtgtgagccactcccttctggcagaggccgacctccaaggctctgttctcccctccccgtgtacatatactcccggtttccctgcccctccattgcccttggctttttctggtatgtgctgtgctccacgaccaagccgagaaaggacctagggtggggaagggagggtctcttgattcctaaccgcccccacatactgctccaccgctgaacttcgggtgccggggaggagaaattgggctgatgtgagctccccgtcacccgccatggagccggctgtgtgtgttcatcagatacagttctcccttaaccttgtcctttctctcctgtgtctcagtctccgtcagtctgtctttctccgctcttctctgacccctgtgaggaacctccttaccctgttctggaatcgctgccagactgtagcttttaatttaataaaaataaagtaaaatatgcaactctttatgccacacccgttcttttccagggactgggtgggggtggggtggggagagggacctgctggaaaggggagaggggatgatggggtgatccctgcgtgcactcccagtccctctgcctcctgaggacctggggaaacgggatgcaccagcgggctctgtagtaacactgagaaaccctgggtcacttcgatgttggaattagtattaagagggtgtttttttgttgttcaactatggttgtagagaaaacaaccctagccactctgcgaagtttggctggggtgggagtgggggcggagccgggcagggggcggattccgcagcagcaactccccggacgcgcgcaggcctcaaagccccccagcttcagtgccccctcgaccctgaaacttggagcagggtgggggttcagtatgaagcccccggaccgccccgcccctggccgcactgaccggatactgggggtcatggggggcatgctgcgcgcatgcgccctccctgggcaggagggggtaagaatgggggctcgcggtggggtcgggggtctttcggggccttcaggagggctgcacccacaactcaacttatccgaaaacgagttctgcggggcagtcgcaggaatacatgaattctattacgagggccatagccccgttctgggcgagccttttataacaatgtgggttttgacaggtaggagaaggggaagggggaggtcagggctgcctaggagggcaggttccttacagtggttctgtccccgcagcccccaaggagaagccctctagggttggtgggtaccgagccagagtctgaacgtacggagggagatcacagaagggatcgcgaacatgaggtcctcgccggggctctgcagcccggtaagaagctgggggtggggtggggcacagtttgctatcctgcgccaagtggcgaattcaaaaatattctattcttattagcataaagttcgcatstaatttgcatgagacccatttaatcgcagagacctccactcttcttgccttcgagtccaatgtgtgtcccccatcccagtcgatcccgagccctcgcaggcagagtgtccccgcgccccacccctggcccctcgccagcccgggctccaggacttcgccttaattggcgattagtcttagctggagtcccggggcctggaggaaagaagggtcctgagagagggcggcatctgggttgtgttcacccacaaaagactccccatacacgcaccccgtaccagggggcctctgtccactcggccggggacagccccaaacccagaacatcttcgcacaggccaaggccccatccactgagtcctccttcatcgcagaggccaaggggagacctgggcagaccctgcagacaggctgaaccccgaccccagcgctccgcagagcccgggatgcgagagggagggggaccccggggcaggggagcacgggctggggaggggaaaaagcgctggggacgtggagtgggaacgtggtggtgtctgggggaggggcgatcggggcgggaacccggcgcaggcaggagggggaacgcgatggagagggcggagctgggccgcagaggccccgcctcgtggcggccccgcggccaggcctgttattcagctctccgctccgctgggacccgcacagcgccagtggctcgggggtcggcsctcgcctcctccccggcccgggcctagagccacccctaaccagaggccggagacagctggagcggctgccgcatcccggcccagcctcccctaccatccctcccccttccactggacatctggaccctaggcccccgcaccgacagggttccggaaaccctccccgcccagcccggcggccgggccccgcgcctctctctctctagagcccccagccctcctcaagactagacttccgcctacccctggacacctcctcccggtcccctccctccccccctcccacagcctggaccggggtaggagggagggggggtgtgcgcccggcgccgtccccgccccgccccccgtgattccccctgcatggccggcccgggtggggggcgcgggggggcccgggcgccatgcggggggggcacaaagggggtcgctgtgcctgtccccgtgtgatccgaaaagtgctggcaaaatgcggctgctgcttcgcccgggggggacgtggtgagtgccaggtcgagagggtccagtgttgagtggggggcgggctgggggttcagggcatctgtttgccctggcccttgggatttagggttggagactgtatgtgttttccaggaaagtggtttcttaagtgatccctaaggtcccttctgcctccaaatttctgttagttcaagttaaggaaataggggaaggggcagggaactcatctctttccctttgtcaaatgggtttgagaaaaacccacccacaatccccttaggcctagaaccgattattttcctcaaaccttttgctaagaatctacttctgaagagggacaggagaatggaggaatgagaatgaggtggttctacaaggggctttataaggaatcacagctctctgtcgctgagcacaggccaacgataaccctgatggaccctcctcactggcctcctctattgggtctacgcatgtgttggggaggtgggctgcagaagtcttttctttttatagtgattactgcaattggtggaggaggggactgggagtggcagatggacccagctcatcctcccctcttcccagagaatggtctgtacccattgaaagagggagggttgtaggagagcagatggccacccccagcttccaatgtctgcccagatggctgcccccacccccatatctatgctatgctcaggatatggggaacctccacatgtaactgggggttccaggcctggagagccaggcgtttaccttactgtgctttctcccaggggtgccctggtgaaattttctatcctggccaactcaaatgaggatggcaagagagtgagcccttggagagagaggctgagcatcatgaagagaagaccctgggagttccctggggaccctgagtctggagctggggcaaggtctatcacctcctctctttttcctcccattagaatcctattccattgcgggcagtgaggggagtatatcggcttctgctgcctccggtctggctgccccctctggccccagctctggcctcagctctggcccctgttccccaggccccccagggcccgtcagtggcctgaggagatggttggatcattccaaacattgtctcagtgtggaaactgaggcagacagtggtcaggcaggaccatatgaggtgagcagggaacggcaccaaagcatgtgggacatctatgaaggacactggcagagagggcaagttggggccacccagctactgtccccgacctctgacacttgatttctggcccccagaactggatgttggagccagctctagccacaggagaggagctgccggaactgaccttgctgaccacactgttggagggccctggagataagacgcaggtgtgaggacaggctctggggaggctcctttcactcaaggggcattcgtttgctcaccctaggatgttctttccttccagccacctgaagaggagactttgtcccaagcccctgagagtgaggaggaacagaagaagaaggctctggaaaggagtatgtaagtgtccacagcccttccctgcagttgcacaacttccagaagactgtccctcacattttagatggaatttcctccaaggttggctatgatgataaaggggaggagggaggaacgggctgaaccaaggatgagctccgacgctgaagtgggggcctcctcctgctttcatcctaggtatgtcctgagtgaactggtagaaacagagaaaatgtacgtggacgacttggggcagattgtggaggtagctccctttaccccttcccagcccctcctgcctgcttttccatctgcccagggctattttcaggaggtgcctgggcgctyctctgtcccacctctcaagcctccccactcctggaccttcctactctggggrcagggcggctcccaccagggagggggaggtggaacacaccctggatttgtgtacaggagcaccattaaggtggggagagggccaccacatgctcatgacccaacctcaactttcccacagggttatatggccaccatggctgctcagggggtccccgagagtcttcgaggccgtgacaggattgtgtttgggaatatccagcaaatctatgagtggcaccgagagtgagtggtggaactctgacagctaggtgctggagaggggccctcatctggttgtcctgtatcctaacatcagcccattgcgacttaaggaatgtttggagaagttttgtarggcacactaccagggcagacagctcgaaactgctgggagtgggcgaggtgggggttgtgaaatgtatttgacctgctgcttctctaccaacccctccagctatttcttgcaagagctacaacggtgtctgaaagatcctgattggctggctcagctattcatcaaacacgtgaggcttgagggggcagggcctggggcggggcttaggaatgggctgggattctctggagatgcgtcctccctccttgcccaccctgctctctcttaaacattacccctgttaggagcgccggctgcatatgtatgtggtgtactgtcagaataagcccaagtcagagcatgtggtgtcagagtttggggacagctactttgaggtcagtagctgagatgtcttggtgggaaggaggacagaactggggctttccaggctgcataaccaccctgtccctgtccccaggagctccggcagcagctggggcaccgcctgcagctgaacgacctcctcatcaaacctgtgcagcggatcatgaaataccagctgctgctcaaggtcaggaccccctttttcctgggggcacagctggctggcacagctgtttcctcattcatctccccagggttcttagggctcccccagacttcctgagggccctcactggtgtcctcaggggaggatgtgagagcttctaagggtgtcctcgtgacctccctgagcatttcttctctctgtcttaggattttctcaagtattacaatagagctgggatggatactgcagacctagaggtgaggaccccagatcttccaggacacaccatgtgctccttatcctcctagtatctcatgggttcccccagccccttgggtggtttacagctgtctggtttttagggggaggcyggttggggttgagataccrtctgaagaggcaactggcygaggaggcctctttcccaataatgactctcttcgcccaacaatgcgcctccctcacctgtgtcccagcaagctgtggaggtcatgtgctttgtgcccaagcgctgcaacgatatgatgacgctggggagattgcggggatttgaggtacggagatagggcaagaaactggaggcccgatgctcttctgccccagccctagcattcaggaggtccttatggggagttgtcttctcctggggctgaccccayggttggttgggcatgtcaggcgaggaagggaggagcagagaattgtcctttttcttgttctttttccaaggccactatccttttggtttcagggcaaactgactgctcaggggaagctcttgggccaggacactttctgggtcaccgagcctgaggctggagggctgctrtcttcccgaggycgagagaggcgcgtcttcctctttgagcaaatcatcatcttcagtgaagccctgggaggaggagtgagaggtggaacacagcctggatatgtatacaagaacagcattaaggtggggagaaggccacgagggagggcttggagagagagagggcatgaggcctctgagaggatgtctcagaggagccagggagggcctgaggaatctgggggctgtctcctatctgccaattcaggtgagctgcctgggactggaggggaacctccaaggtgacccttgccgctttgcactgacctccagagggccagagggtgggatccagcgctatgtcctgcaggctgcagaccctgctatcagtcaggcctggatcaagcatgtggctcagatcttggagagccaacgggacttcctcaacggtgaagctctcatcctttcttcccgatgtgctctctcagccccttaacctcctgaatccctcactgcccagtctccagtacctaccctctgaccatggcccatccccttttccactgctagctcaaaatttgatagaatcccctaaagccctaagcaattgacattggctgacagggagggagggcaaagtgggagaatgatacaggccctagggagcagacctgtctctgcggtaaccctccttctgttcctctctttgctccagcattgcagtcacccattgagtaccagagacgggagagccagaccaacagcctggggcggccaagagggcctggagtggggagccctggaagaattcrgcttggagatcaggcccagggcagcacacacacacccatcaatggctctctcccctctctgctgctgtcacccaaaggggaggtggccagagccctcttgccactggataaacaggtatgacgaatagagctccctcattgtagggataaaaaggggagagcctctcttgttctgggaccccaagttccctccccatatcattccttccttttatctggtccttcctacttcccatcccttacgcttctcccctctattttaactctggagaagctgatagtctcagacagtctaagatatctagcaagaggaggtggcttggctagggacttaaactgaaaagagagaagtgagggtagatttctggcctttttgatcctctgacttgaatcttttcttcaggcccttggtgacatcccccaggctccccatgactctcctccagtctctccaactccaaaaacccctccctgccaagccagacttgccaagctggatgaagatgagctgtaactggtgaaaaccatgggggtggtgctgactcagccgcctattccccaaggagcttcagggcagtccttctggcactgctccagaattcctccttcttggtgtgtctggagggtgggcaaggctgggagggatatcaacttggaggagaacacctagacccaaggacttttttctgcccaaggaacacagtttccttcagctcccatccctatgcatgcatcatggtccccccaaaaggaggatatgtgggtgggtgggagkgctggggcaggggccagatagaaattattggttttgttttttaattttgtttttcctgttttctgagaataaaggttttgttatatcaccgaggctgctgtcttggcagagggaaggggaggctgtartgggggtaggtggggtgaagtgatatggaagagatcggttggccccagccattggaggagggggtctggtgaaaggagaaggggacagggtgtaagataaaagatgttgctatctttgtccctcaactgcagttgcagcagttgagggacaaagactgaggcatggaaccactggaaagcccttagattcttcttcttccctttttttttttgtagagttagggtctcactatgtagcccagggtcttgaactcctgggctcaagtgatccaccagtcttgccctcccaaagtgctgggattgcagccatgagccgttgcatctggccagccctagattcttgatgtatcctctttacccagcccttctttttccctacccaccctctggtctagaccccaccagaaagcccaatgcagtgtgacttctcaccattcccycaacacccagatacgaaagcacaaaatgccaatgtacctttccttctgaggctaccatgttcagctgagggaggatgggaaggtggagaggatcctgggggctgagaccttttcctggctctgggtctccttatctttgctctctgcgaggtcataagccatgttcatagtgagcagaaggggattcttcttcaagccatggacccaagagcggacagcccaaggggatcttcacccctcccaacttctgggagagccgctggaacagagcgagccaaacattcacacagccatgtccagatgccctgtcctgggtccttaatgcatctccgagtccactgtatccattcrtcccttgggctcagtcacgtgcacttgggcttcctcaacagacaatagactgctggggtgggagggtgaggaggagacctggagcctccctgtgggcccgaggtccctttagccgataatagggagggattcctaaggggggtacaggatgtagcgcccagataagacttctgcggaacaataggaggaactgaagaagggagacccaccctcactgcaccccaccccccgggctttggggtcgtggactgggrgaccagaggatcatggggaggggtgccgaagattcytgtgaatgggggtggrggatcatggcaaacagcaggattctggagttagaacctttatatttctttaggaaccatagggacacatragcggggtggctgacccctttgaacttagtttgaccacatatgtgcttttgaatgcctactttgtgaacagcatttgttttttgtttgtttgttttttgttctttttgagatggagtcttgctctgtcgcccaggcttgaatgcagtggctccatctcggcttactgcaacctccacctsctgggttcaagcgattatcctgcttcagcctcctgagtagctggaattacaggcacctgccaccataaccagctaatttttgtatattttagtaaagacagggtttcaccatgttggtcaggctggtctcaaactcctgacctcaggtgatccacctgcctcggcctcaaagtgctgggattacaggcgtaagccatttcacctggcctgtgaaaagcatttgaatgtgataaatggtgcttcagtttttttggttcctaagaaaaaaatatcctgtgggttcagtatttcccctgaggccctgaactaggcccagccactcctcacagaggtgtgggtgctggttctgtcattatccctctccaatacatgtggctgcattccatgtcagtaggacatgaaactgctttttggaaccagctgtgccccatgaagatgtgggtctgggtgaggttcaggatgggcgctgaacttttttgctctggctgggagaatgtagtggctcagggaaggaccagtgacccaagaggaaccagcctctctctccgcccaaggtgccgatggggaaaggaaccgggagttaagtgaaaagtctaaggaagggtaaatagcgggtgttgagtgtcggggtgcgcttgcctttcggattctctctctctaatatctacacatttccacagccaccccagagccagcgatcagatccggccaaggatgtctgcagaaacgcctaacatagagactctccctctccaagccgcrgctctcgccagacccgagaaggtcctcaagcgagggtgacctcagggccggattggaccctgcttcgtgggaggsgggactcagggcttagcgggcggaggagtatttaagaccgggcggagttggaggtggccaagggcagaatgagcgggattcagggcaccaggacctacccaggcgcgggggacacctctgaccttaagtaccccttggcgaccaggctcagggaagctctcaccgaggctcggttccatcagctcttcaggggcgaagagcaggaaccggagctacctgaagagcgcggctttccccggctcttcgggctgtggaggctgcgggctcgcgcttgttccgggacaggggcgtggcgcctgctgctggctcggctgcccgcgctgcactggctgccccattaccgctggcgggcctggctgctcggagatgcggtggccggagtgaccgtgggcatcgtgcacgtgccccagggtgagaggccctaacagcagcctgtcgggagcacaagctctagagggcttccgggaggaggcttagggagctgggaatccgggagcagatggtgggttcctaccgtcgagggtgggagagagggatctgaggccaagtttgaggtaaggactgtggagctccatcagatccccatccccacctcccctcatctgcgcaatcctgcgagaagccttagacaggttctggctcagagaaccggagagaggcacaacgcctggcccccaggacttggccacagcgtccctgaccttgtctgctccatgacctctcactgaggcccattaacccctcagttccctgatgaggcttgatttagcatccttgatgtcagctcctaagagtctgggaagtgcatttaagtcctggaggttggacaaggccccctccccacagcacacctttccatccacttctatcccaggcatggcttttgctctcctggcctccgtgcccccggtgtttggactctacacttctttcttccccgtcctcatctacagcttgctaggtactgggagacacctgtccacaggtgagtgaccagggacttccaatgactcttcttccctatgggatgaaaatggacaggggctgttatttcccttcttcctaatttccctcttcacctctcctaccttcacctccctccttgcccaaccctgcsaggaaactgacctaggcaatgcttgctagagtgggtgcaaagaggtgggagtttacctgaacttttttcccctatgaaatttggttaaaatgaacatctcagggacttggaaggggaagaataggtgcatggtcccccaaaggggcacgcagtaggcagagaatctgcaggagggagcagtttttgccggctagcgcagctcttcgcgccccacagtcttgacggggcagcagccttcttggagagccgagtctggcagcaggatctcggacccaaggcatggaccytgagctgctgccctgcccagggctgcacagctggtgatgtctgcatttgtcccccggcggcaggaactttcgccatactcagcctcatgacaggctcggccgtcgagcggctggtgccggaacccctcgtggggaatctgagcggaatcgagaaggagcagctggacgctcaacgggttggggtagccgcggccgtggccttcgggagcggggcgttgayggtgagggaggacccggggaggaacccggggggatccctgctgaggggccagggaaattgggccggggaagagggagggaccagctttcggcttgggttcgggagggcggaggtgcgcggggttggtttgctcctcctctagatggtgacagcgcgtcttctcccccacagctggggatgttcgtgctgcagctcggcgtcttgtccacctttttgtccgagcctgtggtcaaggcgctgaccagcggggccgcgctgcacgtgctcttgtcccagctgccgagcctcttggggttgtccctcccgcgccagatcggctgcttctctctcttcaaggtgggggtggaagaagaaaggagaaggggcttctagaggtcccgtgaatagggaaactcgaaaagggaggaaggacggagggtggaggggtagtatgtgacaagggagcaggaaaggaggttggagccacgtggctgaacgagggcgctgaggaggtgtaagccctggtggcactgggtagagagggcctcgctctgggggtcccgcgccggggcgcatgagccctggcacggggccctctgctcatcgcccctgccctcagacgctggcctccttgctgactrcgctgcctcggagcagtccggccgaactgaccatctccgcgctcagcctggcgctgctcgtgccggtcaaggaattgaacgtgagattccgagaccggctacccacgccgatcccgggggaagtcgtcttggtgaggatggccgtgcgcgccggccccctgcccgcgcagaccctgcggtcctgtgggaactggccgctgccgccccctggtggagtgcagagaggccacggaacagagggccggctcacactttccttggcctcctgcagaaggacgctttgaccttccacagcccccctcgacactgtcccacgtctctcacggagcaccccctagacctcttggagtttcctctgccatcctacagcgctcccttgaggtcttgctggtcacagcaccttctctgacatctgtcctcaccagggtccttccctgtaattcacagtgcatctccctctccaccctccaccgacatttctctctctccccaactaaataaacgttccgcgtctccacagatgccagtatatcactagatatcgtccagcttccctctttggaaggctcagtggcatctcttcatatccaccatccttcacagaagcgtcctcttacttccacggctccaggctctgtggcctcaggcatatgtcatccctctttcccagctctacactacaaatcagttgtcaggccctcatcccaaacacatccccgctcccccaggtgctgggctcctgcagccagctaggcctgcattatggtcctctctcatggtcagccccttctagcttctgccagggaccccatctcttcccatgccttcattttgctctctttttcaggtgcttctggcctccgtgctctgcttcacctcttctgtggacacaagataccaagtccagatagtggggctgttgcctggagggtaagagaatgaaaagatgccagctttctcttctcccacctctcccacccaacactccctcttatctccaccccccattttctctgccttccttatctcactgaagcacctaacccctcctcaccatggatccctccctctccagatttccccaacccctcctccccaacctggctgagctgcccaggattctggctgactcgctgcccattgcactggttagttttgcggtgtctgcctccctggcctccatccatgcagacaagtatagctacactattgactccaaccaggtgggactctgactgtggaccccaaccctctcatttgacttcccaccatgcctttgtctctcccacttcatctcactgtatccctccaggagttcctggcacatggtgcctccaacctcatctcctccctcttctcttgctttcccaactcggctacgctggccaccaccaatctactggtggatgctggtgggaaaacacaggtaagagggcatccttggatgaggagaaaggatgggccatccaggcaaggtggcggtggtggagaaacaggtggaagatggctagaatcccaggtggcacctatatagagaagactggggatctgtgagaaagggtgactgaggggatggaattatagataggagagatggaagataacaatgttccagtaagacctttgtaggctctaascgctgaaaaagtttatggtgccccaggtgtggttcaaaataaaaacacaaaactataaaataaacttaagagataaaattcttatttttttcacacaatgacattgtcttttaaaaggaatatcacatatcaaagtctccccctaatatttttggtttcccttactttgctggtgccctaaacacatataccctgcttatagggtaacccaacagtggcttttaaggtggaggtgggctacaaaactggggaacttgaacaatggacatctacaaggagactggtgaataatgggcatttaattaattggggggagcgggagggttagatgtgaatggcagaatattaagaagggggttgtgtggaaggagatttgggagaagggagacttccgaggaagattaggcagagtgggcaggaagaccagctctcatgtgggggtgggaggctctcttccttttttgctcctgttcctccttttctctagctggcaggcctcttctcctgcacagtggtcctgtcggtgctgctgtggctggggcccttcttttactatctgcccaaggtaakgagcagaggaggcatgagcatggctgggaggggtagctgtattccaggacatcgaggtagtcagcccacctcctctgcctcaaggctgtcctggcttgcatcaacatctccagcatgcgccaggtgttctgccagatgcaggaacttccacaactatggcacatcagccgagtggactttgtgagaaatgccattacccccagattgccccctctcatcttgttagcatccccagcctctgccctgaaccaaacctaattgtcctggtcttaagttctgcaacccacccactcccccagcaaacataactcctagtatgctttactcacaggcaagggaaaggatggggtttgaacccctttggcctgaatatttgtaacttcccaactggtgcgggtcattacatttggtgtgtgtcccattgaatcaaccctgttgtttccttctgtcatgctttccacttcttcctggatcatctctccccatcacttgccttggtagtcactgccctggatctctttacccagcagtgatggcctggcttttcttttgggcaatccacccctatccctatcctgcaggctgtgtggatggtcacctgggtggcagtagtgaccctgagtgtggatttgggcctggctgtgggtgtggtcttctccatgatgactgtggtctgccgcacccggaggtgggcatagagatgagtggagttgaggtcggggcaggggaagagaatgaggtgcttggggtgactctccagccaggccaggctaagctggaaatctggccccaccttcttccctagggtgtagtgcctggcacttggacaggctgaggggacagagctctacagaccactcagaggaagccccagggtgggtgggctgcagccaaagaaggaagggaagattagccccagacatttctctgatcctttgacctcttagctcctccaggtcccggggctctgcatcctgagctatccaacaccactgtactttgggacccgtgggcagtttcgctgcaacctggagtggcacctggggctcggagaaggagaaaaggtgaaggagcttggtttaggagggatgtggatcctcagggagtgggaggcaggtgggtgttctgagggggatccttgtgctcaaggggtgcatgttcatgctgtgtttcgggagtggtgactgcccttctttacttataggagacttcaaagccagatggcccaatggttgcaggtgagatggggtgacaagaaggaagatttgggcatgttgyatggtgacacctgggtactcctgtcttctcccattctagttgctgagcctgtcagggtggtggtcctagacttcagtggtgtcacctttgcagatgctgctggggccagagaagtggtgcaggtgagggagagggtaggttgaggagaaaccccttagcatctcactcataccctctgatctgggacttaacccctttgccccatccctgcagctsgycagccgatgtcgagatgctaggatccgcctcctcctggctcagtgtaatggtgagatgtgtggagaagagcggggcccagtgcctgggcaatgactggacacctgcggtagggaaaaggacccggtgtggacttagggtctcagagtctgacaccctccccacatagccttggtgcaggggacactgacccgggtaggactcctggacagggtgactccagatcagctgtttgtgagtgtgcaggatgcagctgcttatgccctggggagcctgktaaggggcagtagcaccaggagygggagccaggaggcactgggctgcggcaagtgaggcaggggtaagtggctggagacccagggagaggggtttgggaaagggtctgaggaagatcaagaagaaaagggtggggacggaatgaatagtagattgaagaccaaatcagggagcccgggctgagctatgggtgaggaactgaagaactcagatccctaagtaggtggggtacccctgagaggactgccacatttcattaaggaagaggggtgcctaatctattcctgacatgtctcctctcttctccaggagctcactgacccaaagatttgcaccgtgtgggtctgacctcatcatgtggagtgcagagggccctgatgacatgtgtgtgatgaggaccatgacccttgaacccccttacctaacgtaactaataaaatgaagctgagagctttggaatmcatgaagtgagtctaggtgtttgcacagggactctggtgccccttcttttgtgcccacagcattgcagagacacaactaagaatggctttcaccaaccaccagccctcaccccagccccagagccacaagttctctctgtgggggtggggctggagcaggtacacagagtactggatctgaagatgcagatgaggggcacagtyttgggattatgtgttggggaacttccccaccccctcggtcccaagatgagaggacagtgtttccaccttaggttcttagagtccctctgggctctttggcacttggaaagtgatccccccatttcctgccccatgagaatgggcagggggaggacttggcactggctgtgggagaggttatggctccaccaggcctctgggcactggaaaaaggaggggtgtcrccaggacaacccctactgggcatcaggttctgaaaaggaagagtgaggaactagaggctcagggacagccagtagagtgctcacagggtggtggggtttgttggaaattcctggcagggacaaggaggcaggcccagcctgacagtcagaaatccccagcgggccatcactgggaggtcatgcactgcagccggtgtttgaagaagagcagccggtgtttggccatctggctctcgtccagtgatcctgggtaacggtaccgggcgtaagtctctgctccggcatcccttgatgtccaaggcagcttcagtttggatgcatgatccaccacgacgtcggagcaggagccaacccgaagggaaccaagcccatccaagaagaattctgggggtggaggggagtacacagtgagggatcctgagggtgcagaaggccgactggtaagggagaactctcaaatttagggtgtggaaagtgtgtgtgcaaaggcttgtttctaaggaccctgagcatgtaaatcaactccctgggtctcagtcttactcttgtgtaaatggagtcaatatacttgtgctttgaaaatcgaaaaacctacccctactcccagaggttaaataaacgccagatgggttgcaccgactgtggtctgaactaggggaagccctgggagtagagcaggggtggcgggaacagtgatggggaagcttatgggggcccagcggctgtgctgggaatggagattcaacatggcacatgtatacacatgtaacaaacctgcacgttgtgcacatgtaccctagaacttaaagtataacaaaaaatatatatatttataaaaaaaaaaaaagagtatgcggggctgggagagggtgggagctgtctctcgcccaggtgcaggtcttggtaaatcactgcagaactgttctggggttcccgctggcggctgggcgcgggtgcagcctaggaggagaggcgcgtgaccgtgcgccagctccccgtggggctcctgccagggtcgaccgggagggggtgccactcacccagatgagccacgcggctgaggcgggggtcgaaaccgacctcgcgcaccttgtcagtccgcgccaggaagaagttaaccacgccgtcggtgaccacgcagcctgggaagccgacgagctcgtggtggaagccgcgcctttgccggaggcagttcccgaggcctggggcgccgggctccacgctcagcagctgccgataagtggtggcaaagccggagatctcgcgcaccgcgccccccacctgcagggagagggaggttgcctccaggcgggcctgggataggggacccgaaggggtcaaggtctgcgctccggtgccttcgggggtacccctgccccatcctcttccgcttcacccctgcaggacccagacagttcccaggccccacttcgtggttctctctttgtcctagggctggccgttcctggccgcagcgcccccgctgtggccttagcctgttcaaggcccttctccacccccacatcctgcagcccctgccctaccaggtccagcggcgtccgctccagcacgtccacaagcctctccagccgcgtccgcgccgtgaagacgaagtcgtcgtccacccacagcacgtacttggtggttacttgagacacggccaggttccggcctgcgaaccagccctggcagaaaggtgtgtgtggttggggaggctgcagaaataggacatggccctctgccacctttctttctctcccccgacccttctcagcttgtattcttctccagacttttgagtgctttcgaaaggccaggagctaggtaaaagaaatgcagatccccacagaggttccaagtcagtggtcttagaatgcgtttaatttccgtgtgcatttatttattcattcatcagctattttattgaatgccattaggcactaagcaccattctaagaattcagagagaatttcctgctcccacgaagcttacattccaggaatcctcatgcttaacaggcaccccatgattctgaggcaggtggtcctcgaatcactaccctggaggctgcagattgagggcacaccccctgcgggagtcctctggcctgccgttcagcctgctagctgcacaccttgccgaagggcatgagatagtgttccacgtaggggccactaacgcgctctggcttgtcgctgtcgtcagcgatgaccacggtaaccgttgggtagaagcggcggatactggtgatgagagcccgtagccgatcataacggaggaaggtcttggtggcaatcgtgactagagcgctgatgttgtactgggctgagattgggggcacagggttgggtgcagacaaggagggttgggagaggggaacaggtagatatcccctcccaggactgccctctcccaacttgctccccaccaaggctggttctaatatgtccctgcccctaccagcctcacctccctggggtagagacccaggtgggtacagccgagggttgggcgggtgtcttatgcggatagtgaaagcagcctcatgtccctcggtggagaaccggactgggaagaaaggacatggcatttgaccctgaagggtgggataacattctgttttcagccaatcaatatttaagtgcctactctgtgtcccacctttctaggccttggtggacaagaacagaaggttcttacctttatggaacttacattctaatgggtaggagaaaaaacaacaaagaaaattttaagtaaaagctaatctttattgagcacttactatgtgccagacccgttaaaaaattaccttaaatatatgcactcattttatccccatgatagccctattaagtagattcctacaacagaaaaaaaagctgagacacagaaaagtaacttgccacatttacacaactattaagcaacaaaactgatagcaacctagtcagtctggtgccaggctaagtaaattaaaaaattcagatactggtaagtattgagtggaaaataagacaaacaagtaatgtgatagtgaagaggaggcatttgaactgagatctaaatgacaagaagaagccagtctgcaaaaatctggggaagagcattccaggctgagaaaatagaaagtgcaaaggccctaaggtggaagcaaacttagtgcaacaaaccagctttggggagaagcaaagagggcttttaggcctcttttgctggaagagaaatgggatctcaggaaagtaaagacctttgccctctagtaaggggtgggttgggaatatagtcttctaactccttagacaagtctcttcctggggccccccacagttggcctaaaggggagacacacccaaggctcgggtttccctctggcctgctccagccccagatgaacaaaggccccctttctccctctggccctgctggtccagttgaagcacccattgtgtggctggacagctctggccatagcccagatgcctcccatgccctctgccatttgcccactccagcctttctggttcttctctgtttgcccagcctgcccgtctctccacccaggccttgcacctgtgtctgctgtgttggtctggtagcttcggctgctgtaagtgaccagttgtagttgcctgttgagttggtccagccctgggctgacaagggtgagatctgcctgaccctctccagtgagagtaactccagtcacttcccctgccacgtcccaggtgcctagggaggcagtcaggttcacctaggaggggattggagagtgcagggttaggccccagacccacttcttgcctccctgattcgcccatccttcccttagtagccctgcctccctcccagcattcttgatgcctacttggcctccttgccttcttgttttctctcacctggtatacctcctgaccagaagctgcctgaaggctcagccctaggagaaaggagtggggggatcagaatcacataggcagccctgaattctttctcattttctctccctgctgtcaccacacacaatagagaactttccacctattcttcttattgaggcctcagcagggcacactgtataacatagcctacagtgactgatttttgagcccgtcccgtcaaagcttgccctatggcctgccctgaccaccacctaaccaatggttagtcagcaaagaatagattatttcccccaaaactccccagttacagtcttctgaaattcctagagtcccttctgtcctcacttcccacctcctaagcccccgtttgagcttaagtcccccattcatcagaggttcccacctcccattccaatcatctcccattcttccccacccaaccttgggctctgccacccccactgtggctgaggtcatcctctgggaccctcctccctacctggcaccaagatgctcctgaggggctgaacttccacaccctgtagggggtactggagcggggagttggcaggggctatgagcagctggtcagctggggactggctcctggcagtggaggaaggagaggacagagcagagtcggggggagagggtctctccctcccggcacaatcactgctctccccctgaggagtcatgcgcttctttcaagctggtacctcgacagaaaggcctggaactcctgctctcttgtggcagaggcagccctcagctctgcagggtcaaaggccttggtgaggtcaatagctcggacttgtttctggaaggggagggggaggccccccccactggactcacaactgcagttgttccaagccagcagcctgaagggggtaggtagtgagggtcatcagagcccagctacacagctccattcatcccataaacactgacacagcaccccacaccttggccctgcaattctgtctgtctaggctctgtccccttaaatgctgcccttcaaatagtcctcgggagggggaccaaggatcggatgacctatcccctaaatctggattttagagttgtaggatagggccaattaccaggatttcaggagctgcctacccaccaaccaggaccccacctggagtctcttctcatacctgaatcaggacctcagggagtctttcagggccctcccttgactgcacaacctcccacgcccatccccatccttatccccatggcaaggttcagggagaacagattttccccagcccaagcctcagcagcctcccacttccacctcccacttcactccacacagcccgttaggagaatgcaggcatctgagcccagcagtggagaaaacaaaagcccccagaccacccccagcgagcgctgcgctgcgccgccgcggtcggcactcaccccactacttgctccttgatcctgaccgggatgtgtgcgtagcggggctcaggagcaagatctggcagctcgggcctgcgggggctttgcgggggcgcccacggcgcaagaggtacccggaggccgggcgcgtcccgggtgctcgcgtacaggagccccagcgaggcgcaggcgagcagaaggaccagagcgcacagggcccggcggcccagccacatcctaggtgggggtagggtggggagtgagaaagggagggaagaagggagggcaagggatggggcccttggcccccgcgtcctcagaggctcctgccggctcccaagggcgctctccactccacacatcgcgctagggtttgcactgccagccgcggttttcccggtacccctcccctcacttcccaggccccagggtctcccggcctcctttcttctcgccctctcctgcatctcggtttcctctcacacccgaggcctggcatcttaatgctgaagacatttggatgccgcggtttcgacgcggccgtgcgtaagcggaaaagccccgctctatcagggcagtggcagtccccaagcccgccgcccgccctggccggcgcgcccccgactcctcagtctgagcatcacctgggccggggtgggctgcggagggcggctccacacctagcctgtcaggaaaaaatgcagaatcatgcccgtgctggcgggcgcccccggcggaggtgacccgatgagtggcctcggcaagcggcgcgggggacagagtggaccgggaagcgcgcctcctcccgcctcc

SEQ ID NO: 94639 - DNA, 32413 bp, Homo sapiens
acatctttcatccctgctttggccaggtgataagccagactcacaccaacacagccacctccaattatcactgtttctgctctgtctttccattgtgtttctgcagataagggtggtttttcctctctggaagagggaaagttaaaatgggaacttcaatcggcaatggtagctatagttctggcctaaagcacttccccttacccgtttctctagtacttaacacccactgactgagatttgcatgatactgatttaataatttggagcatctaaactgtgatttaggcaacctggttgggggaggggtgtttgagccccattccatataatgattctggtccattgtagctactatagccaaagaaatgaacaagtagcttctttttttcaaagaatctagagaacaggtcaggtttggtgatgcacacctgtaatcccagcactttggaaggccgagatgggaagattgcttgagcccaggagttcaagacaaccctgggcaacatgacgaagccccgtctctataaaaaatacaaaaattatccaggcttggtggcacatgcctatagtcccagctacttgggaggctgaggtaagaggactgcttgagcctaggaggttgaagctgcagtgaaccatgactgcgccactccactcagacctagcagacagagtgaggccctgtctcaaaaggaaaaaaaaaaaaagatttaaaatggtacagctgtctagggtactttaccatgaatcaagcttgtaggactggaagttgctctagatgagtctgagtgagaggtgagtgaatgtgaaggcctaggacattactgtacactactgtagactttatcaacactgtacatttaggctactctaagtttatttttaaatgtatttttcttttttcaataataaattaacagcttactgtaacttcattattttataaacttttaaatttttttgatttttgtaataacagtttaaatgcaaacacattctacagctatatagaaatattttatttctttatatccttattctggaaccttttttctattacaaaatatatattcttttttaacttttcaaacttttttttttccaagacagagtattactcttttgcccagcctagagtacagtggcttgatcttggctcactgcaacctccaactactgggttcaagcaattctcctgcctcagcctcccatgtagctgggattacaggtgtgcaccaccacacccagctaatttttgtgtttttggtagagatgaggtttcaccatgttggccaggctggtcttgaactcctgacctcaagtgatcctccagccttggcctcccagagtgctgggattacaggcatgagccactgtgtctggcctcaaacttttttattaaaaactaagacacaaacacacacattagcctaggcatacacagggtcaggatcatcaatatcactgtcttcacacctccaaatcttgtcccactggaaggtcttcaggggcaataacacatacacagctgtcatctctttttcttttcttttccttttttttttttttttgagacagcgtctcactctgtcacccaggctggagtgcagtggcgccatctttgcaaattccacccccaaggttgaagcgattcttgtgccttagcctcccgagtagctgggattacagacacgtaccaccacgcccagctaatttttgtatttttagtggagacggggtttcaccatgttggccaggctggtcttaaactcctgacctcaagtgatctacctgccttggcctcccagagtgctgggattacaggcatgagccaccatgcccggccagagctgtcatgtcttatgataacaatgccttcttcaggaatacctcctgaaggacctgtctgagccaattttactgttaactttttattttataagtaggagtatactctaaaatgatgatttaaagtatagtgtagtaaatacataaaccagtagcacagtgatttattatcattgtcaagcattatgtactgtatgtaattgcatgtgctatagctttatgtgaccggcagcacagtaggtttgtttaaccagcatcactacaaacacgtgagcaatgtgttgcatatgacattatgacagctatgacatcattgggtgataggaatttttcagctccattataatcttacgggaccaccattgtatatgtggtccatcattgaccgaaacatcattataaggcacatgactatacatatatgtatattataatatgtatattctatgtgtgtacacattttagagtaaattgtaggtatcatacccagttacttctaaatattcttttgctagtttggtaagaaaaaggacattctcttacataacaacagtacggttttcaaagtcaagaaatttaacattgatatactattatctatagtccatatttaaatttaatcaattattccaatcaatttatagctacttttttccagtcagagatcaaatccaggattctgtctctttaatcccctttaatttggaacagttcctaatacttcctttgtgttttatgaccttcacattttcgaagagtactagccagttattctattttattttttttttagatggagtcttgctctgttgcccaggctggagtgcagtggcacgatctcggctcactgcaagctccacctcccaggttcacgccattctcctgcctcagcctcccaagtagctgggactgcaggcgcccaccaccacgcccggctaatttttttttttttttgtatttttagtagagacggggtttctccatgctaaccgggatggtcttgatctcctgacctcgtgatccgcctgcctcagcctcccaaagtgctgtgattacaggtgtgagccaccacgcccggccagtactagccagttattttatagaacagttcttactgtgagtttgtctggtgtttcctcatgatgagacttatgttatgcatttttggcaaaaacatcatgaaactgatgttgactccttcccagtgtatatgattaagaagcgtatgatgttggtttgtcctgatattggtgttgtttctgtctgatgacttgcttaaggtggtgtctgtctgatttgtctagtaaagctaccattttttcctttgtataagtaataatgtgaagtgttactttgagaccatgtaaatatcctggtccttatcaaacttttactgagtggctttaacatctattgattatttcctaaccccatcattcctattatatttaatagttggcattctactgtaaggaagtaattttctttcacccttgtttgttggttgtttatattaacatgaatttatggatatttattgttttcagtggtttctaatccattactagtcatcatttatttgaataccaaattgtcctagatttggccagcaggaggttctttcagttgactcctgtatgcttttgacatggctacataattcttagagcatgtccttatttcctggtgccacaacatgtttcagcagttttgtttcaccggtttttagatgactattaatgtctctttgtatgctgtgtgagaaaaaaataatgtacatatgacccaactactttggacggaaatccatttttaaacagactgggcatatcttgtactttagttgaaaccattatagtggtgacaaaaataataatcttaaaggttcttttttgtgtgttcaaaagaaagaattatttctttcaggacagtggtcagttgaaacaacaacaacaaaagagaacttaagatcaggaaacctgggtttgagtccccaatccaactgaacagctattttagagaaatttacacaagggtctcaaagttttctcatttgcaaaacggagctgtgaaggttctgtttggcaacatatgataaagcattatcaaatatatagtatttcctcggcccagcatgccataataggtttcagactaggtatagtgtttttgattatgtggataactatcttaaaatccttctgaatgtagtcgaggatgtttataagagtatttgaaataaaacttaggagccatgcaaaaaacccaggtcagttatcttctgtattagaaatgataagcacaaactgtatgcttgttcaactgctttccaaaataaaacattttttgatagtttgaaattgggtatataaagaatatgcaattgaaataactcaacttttgggtgtttttgtttttgtttgtgagatggaatccctgtcgcccaggctggagtgcagtggtgcaatctcggttctcactgcagtctccgcctcccaggttcaagcgattctcccgcctcagcctcccaagcagcttggactacaggtgcacaccatgacacccagttaatttttgcatttttattagagacagagtttcaccatgttgatcaggctggtctcaaactcctggcctcaagtaatctgcccacctcagcttcccaaagtgctgagattacaggcatgagccaccacactcagccaaaatatgaattttttggatagtcttgaaatttgtatcttatttatctaatcagtttgtttgttaaatttccattttattttgcactggattaaaaacatcattattataaatatttttgcattgctttacaatttacaaagcactttcacatgcattctcttatttaatattcacagcaatcctgtgagttatatagagcaaaattagtatcctcattttatagatgaggaaactgaacctcagaagtgtaaggtcacattctgtgtaacagatggcgcaggaactgtgagttggtggctactgcattcccagtactggagacaaacctagcacatcacaacacccagtaaatatttgttgaatggatagatggaactcaaaagcaggtcttctgattccagaatttcaggtcataggacataaaataaaattcgaatcaactcataataatgttgagtgatgctgataaacaagcctttcctggcaaccaggaataatctacaaatataagaagtcgaaagatgttcagcattgctcatatttaaatacagaccaatcaaaacaaggacatgccatttttacctatcagatttagcaaagataacaaaatgggctattctgggaaccagggaagatgtgggaaaaagacacacactggtgtgccgcatgcaaactcttgccacccacttggagaatgtgttgctgtctttcaatctttcagatgcacgtaaccttttccctaacaagttcacctttaaaaactgttgctaccgactcccatatgtactcaaagatagatgcataagaattttcacatgcacgttatttgcagtaataaacaaccaaaaaccatttaaatgttaatgaatagactaacgatagtgtagaatattgacaggatggaaaactatgcagccattaaaaggaacaaggcaagtcagcgtgttgatatggaacaatctccaagatatattgataattgtaaaaagcaagatgtcaaaaagccaaaggaaaacctatactgacctgtgtttgcctatgcatagactgtctctggttagattcagaagacactattaacaattgttcactggccaaggggattggggcaggagagactttacacggggaacctttggatactgtttcactttataattaaaagataattcgagaagatatatcaaggcctatttcttggaggccagagcgctcctaacccctgagcctgcctcagcctctggctcccacccccgcagccgccccgtcgcctctgagcaggacggggccccactcacccttcccggccgcagacagagcgcgggcgcccgggggagccctgcagcgggcagctccgcagcaggaggccccgcagcagctgcgcgccgggacggagcatgactaggccgaggccgagggcgcaggcgcctgctccgaggccagcgggcagcctgaggccgcggggccggcggggcgggggtcggatcctccccccgggctgggggcgggctcctagacggccgcgcgcccgggaacccggcgcccacagagccgcggcaccatggcacctgctggacgcccgggggccaagaaggtgagtttcgtcccctcgatcctcgcggagctcctggccgctgggctgcgagcgactccgttcacacccggygtccatccctagccaagccctggggcctcggcaaaacacttggacgggatggccctgagcctcrattttcccctgtcacgggttggttagcgtttatggagcccttactcgrtgcctggcgctgcacagagtgctgtgctcragttatctcctcatcttcacaattatccccatttcacaggtgaggaaactgaggctcggcgagtcaggcgactagctcagggtcacgggtccagccccgcggggagcgaggatcaraagtctagctttcggacgcatgtcgcgcacacattttcttccctcaaccgaccctcgcccgcagctctttgggctaatccgtccgggaactcttcggactgtcccctcgcgttttggaaaagtcagcagcctggccaagcagcctggccttgcgagtcgccggctggtctgaaactagtcctgggcaaggacgcccccagagctgcggtgcagggtggagggtaggtgggattcgctagcacccctcaacctcctctcacccggtggtccccagctcctggcccctttcctggtctggtcaccagatgttggctttatgcccagccatttctacgtcgagtatgtgtgggggtgggakgaaggagtgactaagcaaaattaggaagggcatgagcttggacgaaagacatccccaggacccttcagagacccccacccgctccagccctgtcattcagaatgggaggaagggaggaggggcagtttatgcgtggaaatgtgcaccaccgagctatttatactaaaaagttagaaacgaccaagatactctgcaatacgggattctaaataaattaaggttcatctacttaagttattagacagttaaataacttagtatgagaaccagctaagtgccttggcaatgttaagttgcaaaaggaaatatatcacaaactgatcccaaccatatacaaatatttatatacacactgtaaggaaggacacaataatggtartagttacacaagatgtggaatattggtttaaaaagcatgttttaggatattttttcaggttataaaagcaaaatgtgagcattgaaagaatacagttaataaaaataatcaaagaacattgtgcttttttctctcaactttctctaatgctatgttcatctttacagttcatatttttaaacgtttttaaaatgccctgtttttgttcagtgtctttggggcctctactgttacaacaccaagattatcacacactaatccatgtgaatgtgtacctgggagttaaggtgttaatgggaaggaactaatctcacctctctcctcagctagcaggtacattttaagaattcatttaattgccacagacaagacctccaattaggtctyaaatccaaaagagcagttctgctggcaaatctaggaaaaggggaagktattttagacagactgggtttttctgatcacctcctactacatacacagtgaagttgatccccactgagtatgaatagagatgtcttgaagccagatcttaaacccagaggtcttacgtagtgatatctgcaaaaagggggcataaatgcaccctagagctcgctgtcagatgcaaggcaggttcactgccaaactgatggggaggagggaatgaaaatataaatgtactgcaaaattaatttacagggttccttattttacatgttcctgtctttataattttacagytgactttagatcgtactagtataatggtgaggaacaacasacactggggcctatcgaagggtggagggtggaaggagggagaggatcaggaaaaataactaatggatactaggcttaatacctgggtgaggaaataacccatatagcaaacctccaatgatgcacatttacctgtgtaacaaacctgcacatcctgcacatgtacccctgaacttaaaagtaaaaaaaaaaaaaaaaaaaaaawctaaagaagggatcatactggtatagtaattaattgaggtagttagaatagcagtgaaggaagggctaaaagatgctctgatctcaaatcttgataacttagttattttgctaatggctatgtagaaaaatggcaaattggccgggcacagtggctcacacctgtaatcctagcactttgggaggccgaggcaggcagatcatctaaggtcaggagttcgagaccacactggacaacatggtgaaaccctgtctctactaaaaaatacaaaattagctgggcatggtggcatgcacctataatcccagctacttgcgaggctgaggcaggagaattgcttgaaccctggaggtggaggttgcagtgagctgagatcgcgctactgcactccagcctgggcgacaagagtgaaactctgtctcaaaaaaaaaaagaaagaaaagaaaagaaaaatggcaaatttaaaatggtggacaaacatccagataacaaatgaaaatgtcctccctttacttggtttcataaagacacagtcaaaatatatactacaattttcttaaaacctacctaattgtctgctaaagagtaacattttttcttcttcaggacaaaaattctagcatrtgcaatacatctgacattttcaaaacagtcctgtttatttgctaattcttggcatagtttcttaagtgtctactcattttagttgttatatgtggtggtagggatatagaccaataagatatgtcacctgcccccaagcctcttacagtcaaactgaggtgacaagtaagtaaccagatactgctgtacagggggatgcatgaatgaaggatctgtgaagttaagcaggacacaaaaggggtataatcacaggtgagactgggtcagtgagcctgtgctctggtagcaatggaagacagttcagagtagggctggagagaactggagaccatttcaataatcaaatgcagtgaggatggtggggcatttgagaaatgtgtaatacacttggcataaccctgtgataggttggatgtgggaggtgagaagctaacctacaacatctgaattctgtgccaatgttttccctcgacaattgtttgagtaaattwgattcttttttttttttttttttgagacagagtctcactctgttgcccaggctggaatgcagtggcacaatctcaactcactgtaacttccaactcccaggttcaagctattctcctgcctccacctcacaagtagctgggattacaggcacctgccaccatgcccagttaatttttgtatttttagtagagatggagtttcaccatgttggccaagctagtctcaaactcctgacctcaagtgatctgcctgcctcagcctcccaaagtgctgggattacaggcgtgagccaccgcgcctggcctaaatttgattcttaacatggtgaacctaatgaagtgtatgggattttcaggaaaacagtttgtacacagtaactgtacctctgactttctcttctgtattcctgtgtagcatttattggtcacattctgctgtgattatttgttgatttattggccttccccaaagtagccagactttgagcttgtggagggcagagaccttgtcttattctgatgtttatcccacttgcccacaactatacctgacatgtggaaggtctcaataaacgtccaaaatttaagrccttttttatatttcaaaagtacaaattgaaaagagtgaattgcatttgatgcagggaggagaaagaaagagatgagaatcagtaaatattaacatttcttctgcattcagctaaaattcagctttagatataaaatatggaaaaataaccagagttgagagctctctctgccaaaatagtgtttatgtttaacatagttcacacagctgggctccatttgcctgccctccaagtgcacagtaaaaagatgctgtaggtagagtgacctggtatttacctctagttaaaccccttctgatggaccttcttgcactgcagaggaaagaaaactaaccactttgccagactcctttgcagctaggatctggataagaactagcatccccaatcagatgcaccagtatgagtctgggaaggtggaagcatagcaaatgtggccatagtgcagcattccagggtcacgtgaggggcagctgaggtcgctggagcascctccttctccctatatgacagctgtgtcctgaagccarcagttcaatagtggcttctcttagttgtggcagagggtgcagccccagccggccaattcagtcatgtttttctaggggtcatttctggaagcccagtgtaaattttttatgtacccatttctcaatattaaactcctttctgcttagtcagagtggtttgtacttctgcagctaaactgaacatggggagaaagctagaataagccccctctctagtcatgccattcgatggagattaagagattattcaagccatatttgacctctcatgtttggttccatactgttaacaggactgtcctgggargctctgtgggaagatcctcacgtctgctttaatttctggttgcttttattagatccaggattgacccagctaaggacaaagactcctgtaaccaagatcaaattagcttccctcttattctttattgcctttatggccttccagcctcctgggaaaagattgaagaaaatagtatatcaagcaatatggccaaaatgtgtttgggatctctttgttccttggtatccaaggaagctcgctcctgacacctgggtgggtcactttgtgtggggagtaagcaaaggagaaatagcagatgccagacactagaacagaagcagtttctctccaaaatctgttccccctccttccgaaggattagcgttggagctggacacatggacattcactgatgatacttcctggcttcccttgcagcaaggtagagccatgtggctaaactctcacgcaggaaatgtaaatgtcaatgagatgagtcacttctaggtctgagctaaaaactttaggatgagctttgccacactgtttcctcatcgtttgagacagagtatgaacgtgactctgatccagtttcccccatgctgaggaggacagtaccctagggctgggttggcaaacgctttctgtaaagggtcagatagtaattatttttagccttgggggccatacagtctcagtggtaactactcaactctgctactgtagtggaaaagtggccattagacaatatgtaaatcaatgggcagggttttacctaagactgtttttacaaaaacaggtgatgtgccagatttggtctgtgggctgtcatgtgctgacccctgccgtagggaatggcaaagcaataagataaaaggactgtgcaatttggtgcacactctgtaaaaaagagtcccccacaaacagtggctttcctcttacagaggaaaaagaaactacttttatttaaagccactgttgtgggggcctcttttttacacagcttagttttaccctacacccaacacgtaggccagtaagctgcctatgtaccctgcttgatgtctcccttggattcaggaactgagggggtttatgttgatttcatagaacagataagactagttaaaagaggcatctgaggcttttctccctgatccattcattgctttgtgtccagctatgggcaggcctgaaatgaactggcctattatcaataaaaggttgcatcttccactgatgcagcctacaaaagagggatcaggattgctgtggggagttgggaggagtgggtggtttgcattgctcagggaaggcatctctgaaaaggtgacacttgaccaaagaccagaaagcagtgaggggatgaccctgcaggcacctggggagatgtgctttagaccaagtgaaatgggaaaagttcccttatgccccttgcagggtgtgtgatggaggcgtggatcacttcttcagcaccccacagcttaaacccctagggggagcatgcaggtaccccatggcagcatctaggggtgaatgtttacagctcctgaagccccagtgggtgtgtgttacagtgtgctctttcagcttagctgtccactggcagcttgtgttaatcagctcaattagaccctccgccttatcgaaaggacagagggctttctgtatcccggggttcttgccagtgtactggaaaaattggatcacacatgggcttggagaatgagtgcaaggttttatcgaatggtggaagtagctctcagcagatggatggggagccagaagggggatggagtgggaaggcggtcttcccctggagtcaggccgctcagcagccagactctcctctgattacccctggctgaattccacttcgtctgtgtcattctgccaccgatggcctgccagagtctgtgtgttcttctgccagtgtgttcctctcaacgtccagctgcttgtgtttgtgtttgctagggtcttgaggtttttataggcacaggatggaggtgtggcgggccagggtggtcttggaaaatgcaacatttgggcgcaaaaacaggagtgcctatcctcaccagggtctgtgggcacaggcctgaggccttyctgtatcaaaaggaaactgcaccccatggctaactgctctgaatggaaccttttaaataagttatgagtgggctaaataggaaggtggtaaaatagaaggaaaagagagtaggaatttagaagctagtctgattttttacttacttagctctgtgatcttgggcaagtcaaccattctgagcctcagtttcctcatctacacctgagaataaaaactgtctgtcctgcctcactggcagagttgctgggagtgccaaatgataagacacgtgtgaacacactgcatgactacaaagcgttgtgtccactaccgttctgttcagtggctgacacgaagaaaaattatttttctcacctaacaagaggtccaggggtaacagcccatggctgccgcagccacccaaggatgtcttaagaaatctgcctcatatggctgtcagatgactgctgtattcccaggcattatgttggcattccagccaggaaggaggaaaatagacaaaagggaagggagtgggcgtctatgtcaggaaagcaaaacttttccagaaatcctccaccagcttccgtatgtgtctcactggccagcactgtgtcacagggctgctcccagaggcaaaggaacctgggaattttttgaaagttaggggcattgtccccccacacaaaaacaggggagagaatgcacactaggtagacaactagctgtgttgtcacaaacatgttgaaaagccaaaataactatcgtggaatcagtgctataatttgactcagattaaatgttatttaagaataaatagtctcagccctttcattgtacaaaataggaacctggatcggccaagaaatatggtatgctcaatctttctgaaatattattagagcacatgattttaacaaaactacagctctaagaacgtaataccacttcacctaaaattagaaaatgcttttaggaaaaaaaaaaaaagtagagcggagcttaggtgctttttttctcttcttcaggggattttggagcgcctggagagtggggaggttgtgattggagatggcagctttctcattactctggagaagagaggctatgtgaaggctgggctctggactccagaggcagtgatagaacacccagaygcaggttggtgtccacatccccaagagtgtctacctgagtggtattttatttaaatctgattgagagaagatcaagaaaaaaataacaactgtttcaaaggggtgttttgcttgctaagattgccaagatgtggagataatggcagtatacaggcggaagtatatggaagaaaatgacctctctctctctcatacacacacctacccacatcacacacccacccatccacacrcccacacacactcccacacacacacatccatgcactcacaccccaaccccacatccacacacaccccacatccacacccacatacaccacaaacacacatacacacccacacaacacactctcacacacacacacactytcatacacacacacatctgcatcttaatgtacaggcagtgctaaaatagacatcttaatatttgttccatgaatatttaccttgtagatatacagagtttccttaaaacagcaaaactgttcctgcttytgattcaccctgctgacaatgtgcatggttaagtgtaacagcgtttatagtgagggtgattaatggtagtcacagtgtaacagagcacagacagccaggttccagggttgggagggcaaggaagtcaacacagttttatatcatcctcctggctgggraaaaaaaaaaaaaaaaagagctagaggtaaagaactatgatgggattagatagttacctgaaatgaaaactttaattctcttctaactctttttttgtgtgtttgttctcctaaattaaagtgagaaaataaagccaaagaatgaaatgggtgtaagagaacactagctgagactggaacttttgattcactctgattttatgtatattcacacagcgtatcagataaacctagggtcctgtcttgattcttccactgaccagctgtgtgaccttggacaagtcacttgacctctccaaggatccatatcttaatctgtttcatgggggcacaacatgggctaggtgtgaggactcacaagttaacccgtgtgaagtgcccgtatcatcagtacgatggccgttatgattggtgcatcggacacccagagttctgtggtagagcaggaccaagttttgttcctttggtgcttaacaggatgttttcatctggcccaagaagaacttgttcttaatgttaaaagacctttttgctaaactgggaagaaagtgctggaataacaagagtaaggataagggaggaggggcgaaagtggtgaaggagaggaaggaatgactttcagatagccaggaaaagcttccagactgctttctgatgttcccaaactgcttgctctgactctgatatgggtgccacccacatgcattctgctttctatgagaagctcctcactttactttaagggctgccaatgctgactatagtagaccagctmtgtcctttacaacacaggtatagaataaacctctctagaccaagagaccaagggttaattggccagtcaggccttaatctctgcatgtgactgcaccaagtcattgaggcccatcaccagaacaatacaaggctgctctaaacagtacatcctgcctatgaattctactgaccttaatctataattttttgttactactaggtttgaactgaggtatgattgaaagagatgggagtcagtgagctactgctgcttttgaaaatgatagcttctgtaatatttctttattcatttatttcaatgtttaaaacccaactactttgtagttcgtcaacttcacatggaattcttgagagcaggatcaaatgtcatgcagacttttaccttttctgccagtgaggacaatatggaaagcaaggtaaacggcaatggctgggtgtgggggagggagtcatctattaaaaaataacctcttcatgggaagctatggaattgattatgtgttactatactttattacaaagtccatataaatatgtattaattttcacgtgaagatatatactaaataggtcgggcacagtggcttacacctgtaatcccagcactctgagaggccgaggtggacagaccacttgagcccaggagttccagatcagcctggacaacatggtgaaaccctgtctctactgaaaatgcaaaaattagctgggtgtggtggcaggcgccagtaatcccagctacgcaggaggttgaggcatgagaatggcttcaacctgggagatagcattgagccgagatcacaccactgcactccagcctgggtgacagagcaagaccccatgtcagcaaaaaaaaagaagttaatatatactaaatgaattagctttctcttcccatttaggtagaggaggggtcaggactaggggtaaaataaaccattggaagggcatggctgtcttcttgtgctattttttagagagaaagcacttcatagatgctcttttcaccttctcatttcacacttttctcttctggagacagggaggccctaaaaaacaatactggagtagaaatgagaaaaaacgggtttgatatccagcattgccacctattggctgtgtggctttgtgtaagacacctacctgcattgagcattggttttctctctgtaaaatggagacaacagtagtgcttaaattcatagacctgttgagaagagtaagtaagaccaaggatgtgaaagtattgtgaaatattctgcaaatgtaaaatgttaatacgtgtaaatgttaatgcccattaattcattcaaccaaccaacatgtactgagtatctgttacagtccattctctatgttagactcaaagttgatacaaaggcatagaccctatctggaggtgcaaggtcaagtatgggaggcaaacaaatagttattaaaatccaatgtggtaagtacaataatggaaatataaggtcatggtaacagaggagattgtacccaactctgctggtcttttctgcttgcattgaagagagtggcttatactcatcttacttgtttattgtccctttagttatcttttatattttaccttcaaactgctaggctcactatctgaactcttgctctctaacctcagtgggaagatgtaaatgctgctgcctgtgacctcgccagggaagtggctggcaaaggtgatgctttggtagcaggggggatctgccagacatcaatatacaaataccagaaggatgaagctagaattaaaaaactttttcgacaacagctagaagtttttgcctggaaaaatgtggacttcttgattgcagaggtgaggctagtattggaggaaaaggattgaacctattttgcaagcataactgcagagtcttcacatttcatgagggtattggacaacattctgccctcatttcttccatgtggatggtcaaaggtttatttaaatgcatggtagtcaaggccaacattccctcattggtatgctaggttctcttagagccaaaggacagacccaagagaggcctgaccatagccttttatcttctaaggtctgggtggctgcagaagctgacttgggggactctacaacctataaggaagcatagggcacagtgcctccgggagcaccctctccagagggagaatccacacaggagggcactgcatgtgtgggctggggactgagagagcaaggcctggaaggtggtggctatccaggctcgtctaggccccaccaataatgctcagcacccagtagtttccatagccttctccatccatgtcttgctcttcttgcctctctgctttcactcaagctatgacatgtgaattacattttgaagaaagaatcagtaagaattggtcattgattggacatgaaggcccagaacattctctttcctccacttccaaaacgaaagtcctcattccccatttcccaacrtaactgctactgcctggggtcatgccttcaacccacaactttactccaaacaagagaatatcccctggcttggcgcggtagctcacacctgtaatcccagcactttgggaggccaaggcaggtggatggcatgaggtcaggaatttgagactaccctggtgaacaaggtgaaagcccatctctactaaaaatacaaaaattagctgggcatgttggtgggagcctgtagtcccaactactctggaggctgaggcaggagaatggcttgaacctgggaggcggaggttgcagtgagccaagatagggcaccactgcactccagcctgggcgacagagtgatactctgtctcaaaagagagagagagagaatagccgccaccattattccccctagtgaccccactgaactctactgaaaaccttgcctcatcctcctgcccacgcctggccaaccccactgggaacagtcatctgcagggacaagcacaaattccaccctctgtgctttccagatggatgatgacaccactctgtttgtttaagaacccgtcttttgattctctcataattcctcacactgcttctgcagaatttgtttctaactcaagagggaagaaacaggaagatttctggcttttctttagttgccttaaggtcagcttttcagctgtggcactgaaggggcttcctgggaagcacccaagaaaatgacatgggtttaccagacaagatgtcctgtccaccactggcaaagacagggagtagctatttctcctatgctgtgcctcaatcttctcacccggggaaatggtgcttcccttcctactttatggagcacttatgaatatctaactagaagtgaatataaaagctctttgaactataacacatgataagctactcattgtttcagagattaccccagttttataagagatgaatctaaaatttattagcaaaacttttcctccttcaaaattacaaaattatgattttaaatactcaattactttgaaaacctctgggtgtgttttcttcttttttactaataggcatcatctcactgaatcaatgawccctgaatgaaaaactatatgttattgttataggaatgaaaatgtttactcaraaaggtattctttagtcagtctgatagacacacattccttagcaagttttattatgcatatgtttatattctatttggtaatttttataactgttttgctatatttacctttaccattcaaaatctgctttatgtttggaccagtagaaaaagtgacatttctcttagtattttgagcacgttgaagaagctgtgtgggctgtggaagtcttaaaagaatcagatagacccgtggcagttaccatgtgcataggcccagagggagacatgcatgatataacccccggagaatgtgctgtgaggctggtgaaggcaggtaatttggacccataccgtgatacacagctcagttgttgcttacgaaatttaacaaagtgtgcttgatattgtgagagcagtttggaaatagaagaatgaactccaatcagttttcttatctgtaaattgtgggaggtggaggggaatggctaacctctaaggtaccttccaactattaaaaaaaaagaataaacaaataaataataaaatgtaagtgttatttctttgcacaggggcttccatcgttggcgtgaactgccgctttgggcccgacaccagcttgaagacgatggagctcatgaaggagggtcttgagtgggcagggctgaaagcgcacctcatggtgcagcctctggggttccacgcgcctgactgtggcaaagaggggtttgtggatctcccagaatatccctttggtaagctcaggtgcatagtagaggtccttgtatttctcgtgacaaaatccaaatggctataataaattgtggcccagttttacaataagagactgcatatgacaaaacattcagagttaaccaaaaatgagctatcagaagaatgcatcatctaaagtttatagtttttttaattggaaaaactgctcattagagcatccatcatttgaaaatgagaacagtaacagaaatgctgttaactattgtgattcaggactggagtccagagttgccaccagatgggatattcaaaaatacgccagagaggcctacaacctgggggtcaggtacattggcgggtgctgtggatttgagccctaccacatcagggcaattgcagaggagctggccccagaaaggggctttttgccaccagcttcagaaaaacacggcagctggggaagtggtttggacatgcacaccaaaccctggattagagcaaggtaagcatttttaaattaacattcttattattttcctttaatctcattttatttattgttgtaaatgtcatgcatgcacatgacaaaaagtatagaaatgtataaagtgaaaagtaaaaattatccccttcctgataccagctccattcccaaaattgtctttagtccatttgggctgttagaacaataccataaactgggtggcttatacacaacagaaatttctttctcagttctggagactgcaaagtccaagatcaaggtgtcagcagattcaatttctggtgaaggccttagagatgataaaggccatctataaggaagcaggcattccttatagatgataccttcttgctgtgtcctcacatggtagatggggcaccacagctccctggggcctcttgtcttttttgtttgtttgtttgtttgtttgtttctgagatggagtctggctctgttgtccaggctgcagtgcaatgacacaatctcggttcactgcaacctctgccccccaggttcaagtaattctgcctctgcctcccgagtagctgggattacaggcgcccaccaccacatccggctaatttttgtatttttagtagagacggggtttcactatgttacccaggctggtctcgaactcctgacctcgtaatccgcctgccttggcctcccaaagttagagtggggcctcttttctaagggcactagtcccattcatcagggatgcatcctcatgacccaatcacctcccagtggctccaccccctaatatcatcacactggtgactaggtttcaacatgtgcattgtggggacacagacaatcagaccatggcacagaggaaacctgtttgtcatttgtgttttgaaatcttgtacctctatttcttttgtcatcagttttaagtggtaactattgataaccctttatgaaagctgagggatttaaatcacataggcttccccttttccccgttctcctttttccagttttgattcgttacacttttatttcttctgttggatatctttttaagttaaaattatatatttaaccacctgtttcttagttcatcaatataaggcaggaatctcttgactccactctctgtaaaataagaatagattcccctctgcttctttccaccttccctctctcatctaccccttggtgtctttaagttttaccatactttactatcatcaaggtttataaccattttgttctattctatagttataattgtctttcaagctttctctgtaggttgatcctaaaaatataaaatcagtgaataacatttacaatattattataattgttatattaaacaagcaggactcatgagacataattagaattcacttttatttttgtctccctctatccctttaaacctactcaatgaattccttcgtttgttcctacttgaaaatactgaccagctctagaacttctctgggtgctcttaggcaatggaaagttccataatcactttatttcacagatagtctcagttcagtaattaaaagtgtttaggactgggcacagtggctcacgcctgtaatcccagcactttgggaggccgaggctggtggatcacctgaggtcagcagttcaagaccagcctggccaacatggcaaaacttcatctctactaaaaatacaaaagttagcctggcgtggtggcgggagcctataatcccaactactcgggaggctgaggcaggagaatcgcttgaattcagtggggtggwggttgcagtgagccaagattgtgccacttaactctagcctgggcaatagagcgaaactccatttcaaaatgaacaaacaaaaaaaccccaaaaataaaaaataaataaaagtgttcaggttcatgtcaaatcaaaactcagagcatgtttgaaacttgaagcttctccctttgtccagcaacagccttccacagacaggaaaccaggagaggccagcgcgctgcttctctttctctgttatgctcccaamcttcccttcccatcttgctaccatggtttctggcctcctcagattcaaagtaagaagaaagaggatggataaaggagtaagactgttgttgcttgcctggcaccctgataggaagccggcatcctctgaccctggcagatctttgtgagcacgctcatgggtcttcagaggctcccactggaaacttttgtctgtacttctcatgccacaggcatttttctgactgtgacttctgcctcagacagtggctttttcaaccaggtcactccagatatactctgatttgggggtcctgttgtcctccccggtaattctcttgggccagattttagatagttcaggctggctctctcactctcattaggctcaaaacagctttcaccctttctgcagacaagccatgagagtgtggtctgaccccaatttaacagcaccccttttgcccacaagcaaagtagctggcccattgttctcttgtggtccagattttccaggggacagtcaaatgagtcatctggctggttcgtggccacctccttttaacttctgtgcagtgtctgtcttgcaactccccttgatacctaaaatccatcatgccttggtgtttccagtcaaacttccaatctaatactctgttgcaggaataatagaaaattgttgcatttagaaaaacgttcactgcagaacaaagtagtatgcatgggaccatggataaagagaartaatcctatttacaaaacttgagctacttgttggagaatgttccaagcatcaaggtcaaatgaattttcttctcttgcattcccgtggatatattgtccaaatccatgccatatttcaatttgcttcatacttggtctgactttctttgtatagcctttggttttctagggatttctgattaacttccttttccattgttgaaagaaaaataacagggcttcactttccctgaggtcttataatttctaaattatattgtttgttacagtaagtcactttattattgaaggcatttttcttggggcctcaagaaaattactgttctgttatggatcattgtatttcacacacacacactcatactctgtctctctctatctttccatatagataatcttttgtgtatgtatgtgtgtgtgtgwatrtatatatatatatatatatatatatatwcatatgtatgtatatctgttgatataattccatcccccttccatcttctagaactagtcacaatctctgctgtcttcyctctgttcagtactctcatgtacttcacccattttgtgcttatttattcatttcagtgggatttgaaagtcttcatttttgaactggaaaaatttgcctaatgcaaatttacttaggttgtaaaagtaggcaagaatcacttagccaaagctttcttctaggagatatggatatttaccagagaagatgktttgtatatgtgtcatactttttaaaaagtattaaatataaatataattaaaaggtgaggaaaacatactttggtgatgattaaaatagtttaaataagtgagtagtttatttaattatcatctgctaggaatccttaaaattcattagctattagaattaaaacattattctgtagaccaaagcaagaagacaccctttttaccctgactcccaaacctactgatattcacagaaatttatgattacacaataaacactagatttctgacatctcatcatccaaaaatattgatttattcattgttttgtaagtaamgtggaaaaaacrataaaaatatattcatcagaaagggctacgaccagggacctttgtactcttcttcctttgtctaacaacaagaaacaaatattggtaaagtaatttgtattattttcttagttactttttggagaattatactttgactcattacattaaaaactgttctcgtattcttctcattacattaaaatattgatagagttagaaggactctgttagaaatttcagaataaatataattcataaaagtatgtgaaatgtaaggctgggcatggtggcttacacctgtaatcccagtactttgggaggccaaggcagacggatcactggagctcaggagtttgagactagcctgggcaacatggggagaccctgtctctactaaaaatacaaaaattagcctgrtgtggtggtgcacgccagtagtcccagctacctggggggctgaggcaggaggattgcttgaatccaggaggtctaggctgcagtgagccaagattgtgccactgcactccagcctgggcaacagagyaagaccctgtctcaaaataaaaagtatatgaaattgaaatacgttgtctttttctgaaaggtggtatgaaacctaatgattgttattgaaatgtaagaaaggcccctggcattaatggatatggacacagttttccgtctgtatgttaaaacaaaagttctgctttagcctgattatccaccaagttttgactgtgtgtgtgtgtgtgtgtgtgtgtgtgtgtgtgtgtgtgtktggttatatacatatacatacatatatacatatatgacatattggacttataggtaagacttttaattaattaattatgtatatattgaaacacagggctcgaagggagtattgggagaatctgctgccagcttcaggcagacctttctgtccttcgctgtcaaagccagacttctaaggagtagtgaaagaaaaccctgaaataatcgaacaggaaaaagttgccctcaagcctgacctggaaccgttcctcaccttcatcctcaccatgccctgctatctccagctgctgagcagctgaggtgctgcagccccttcccttccagcccacaagtgtgtgcatattgagctcctgctgtggttaagcactgcaacagactctaccagagatgcaaagagaagcgagagaggcaccttgttctccaagaacttactgtccaatcatgctgtggtgcattcctttgaagatcatgaagaatagccaaacttgtctttgagggtgaatttgacactttaaaataatcagaagtcactgagacccaaagctagtgaataattcaagtgactaagctagatacttgaggatgatagagcaacactaaactaaagcaatgagtctgctttttttaatgatttatacaatgactccaaaggcaatcccaaagaaaagatgtaaagaatgttttgagcaatggtagcattattgaaataaatgtttaactatccaaagtgattactttcaaagatgatttttacttaaagatattaggtctggccaggcgaagtgactcacacctgcaatcccagcactttgggaggccgaggcgggcggatcacctgaggtcagcagttcaagaccagcctgaccaacatggtgaaaccctgtctctaccaaaatacaaaaattagccgggcatgatggcgggtgcctgtaatcccagctactcgggaggctgaggcaggagaatcgcttgaacccaggaggcggagcttgcagtgagccgagatcaggccattgcacttcagcctgggtgacagagtgagactccatctcaaaaaaaaaaaaaaaagatattaggtcctagaatttttaaaatgtgtcttcataatcataggtagctaggttataaactatttaaagacaagatcacgtgataagcttataatcttctcataattccccttacttagcattgtgttagacatactaataggtgcacagtgaaatacttattgttgattgtttaaaaataaagttttagaaaaccttttcaaaagtcagagtttaggccaggggcacaggctgacacctataatcccagcactttgggaggccagggcgggcagatcacttgggtcaagagttcaaggccagcctggccaacatggcaaaaccccatctctactaaataaaatacaaaaattatccaggcatggtggtgcatgcctgtaatcccagctacttggaggctgaggcatgagaattgcttgaacctgggaggcagaggttgcagtgagctgagatcgccccactgcaatccagcctgggagacataattcaaatctattttggtcttatatcttcttatgtttgtgttatttcatgtgtgccagtttctctttttktcacaacaatttatcaatttgtggcaataaaaatgatttaccttttatagtgtttgaatgtcgaaaatgtcatgaacattctttggaataatactagcaaatatttattactcactatgtcgcagtctttgttctaaagatgatctcatctacatataccccccaacagggattcaaaattagatagtgtttaacacagtagtttacaggtaaggaaactgaagtttaaggaggctaggtaacttgcctgaggtcacacaactagtaaatgtgaaattagtaaatttggatttgaacccatggggctggctctagaatccatgcccttagctactgcactacacggcatctgtcatgcacacagctgctgctttttgtcaaaaatctatccaaatttttctgtcgctggattcaaagtattttttatcaactttccttattatgaattaactcttcaaacctgccatgactgtttctgtaatgttgacaacctggaatttatttgatatagccactttacccataatacacaaccccaccctgctggaaattagaaagtgaatcatttactattatctcaaggcctttggggtccttaagggtgactaatccaaaccaccaattaaatacctgaatatcctcgccagcatcttcatcaggaccatccagtccctgtttgaatcccttaaatagtaactcactacctctcgagatcacttactcctttttaagaaacacttcattctctggaaagttattccatgtattaactagaaatctatttattaatgaccctcacctgcagacttggagcacctaaagtgcaaatttataatttcttccatataactctttgaaatttaaagatagctgtatggctttcctatacttacttgtcctcatttccttcaactaaaaggcataggctaagatgtgctttgtcaaatctacctgtgtgacactgtacagttacttaagctttatgccttaatttcctcatctgtaaaatgagggtaaaatagaaccatccttattagggtgctatgaggattaaatgagataagtttcttagaaacagtgcatgtcgtataacaggcattcattgcacattatatagtataatataattatgttgacttggtttccaatcccctcatcctcatggtgactgtcttctgggaacactctggtaccaaagcctctgcttatttttagtatgtagtcctgaacaccacattccaggggaggactgtttacacaatatctcctgcttgcttcatagattttgtggagagggcagtgcaggacatcatgagaatagcaagagtgaagaaggtacattaggagggagagatgtctccacaccgaatcccttccttgggtctgcaccagcacaaacaaaggcttttatctagttactgtacagtttaggtgtgctaaactgtataggagtttgagaccagcctgggtaacatggcaaaactctgtctctacaaaaaaatacaaaaattagctgggcatggtggtgcatgcctatagtctcagctagtcaagaggctgaagcttgagcccgggaggtcgaagctgcagtgagctgtgatcacaccactgcactccagcccgggtgacagagcaagaccttgtctcaaaaaaataataataaaataaaataaaataaaaataaaaattaagaaagaaaaaaaaagataaattttaccatataaaaactttaaatgtatgaacactcacacaaaaatactctaaacaaaggcaaaggcaaataggaaaactgtgtaacagaggtcagaaaccactcttccagtaaaggggtcttgagctgcttttgttcaaacctccccgaacccaaacagatgttgtgaggggggctcgcctatgtgattggcattcagaaccccactccactccattttcttgggcttacaggtattatgagaggacagtgtacccagctgggaccaagcaaagccttggggtcagcactagcatcaacaccatcagccatgttgatggtcactgtttcaggtgtaggatatgaggttgtggatcaggtgccccaggaagcacagtgcacctcgtggagatgatgtgagggccaggtcgttggatctacaggcactgacacagagctcggacagtttctgagcattcatatgttatcccgtaacatggtacctgccagccccacttgactctttccttcccaagaagcaggtcctctcccttgttgggcaacttctggggattgatggtcagctcctgtgcgcccccacgtgcactttgtactgcctcctccccacctccctcaatccccacaactatgtaaggttttcagaaaaactttcttgtcttcttcatatgttattataataggacatcactccaaaagcaataggaaagtgaagtcctcttttctcaatggcatccttattagaggtggggaaatatttgccttatatctttccagtgctgggaaaaaagggtggggggaacagaataacacaatctgagtactaatatcctgccacacatatttgcatacatttgataagctaagggatagtttccttaatctataaattaggaaataattaccttaatccattaaatatagaaaaagataaacacattcaaaattaggtaaatgcacagcaaagtgacgagataccttttttcacctatcatcaactaggatcaataagtggataatatgtcaatgagggtgcaggggaaaagactttctcatacatatgctttttgtagaagcatagtctggtacaaactatttggaaagtaattggtccatatttacaaaatttagaattcacatgcccttggatgagcaattttacttctaggaatataatctgcaattatgttcatatatatgcaaatatgtatgtctggaaaccacctaaatatccatcaatgacatattagtaaatgaattatggaacatctacaggatgttaaagcatggcatcattacaaagagtacattatatcaatatgtgctaagatggaaggatctcctccatatattgttaaatgaaagtatgctcccattgtgtgtacatagaatatttcaggaaggaatatctccctcctaggggagaaagactggtgatagaaagtgtggtgtaggaggaagacttccttttctctgatgcccttctttagtgtctacatttgttaatatggtttggtattactttttctacaaaataaattagttttaaaacatatgtcaagatttctgattccaaggggaaaaatcagataacatgagtttcctgttgtgatacagaatgggaaacactacattaccaatgatgtacaccagccagaagtgcctgggggaatctaatcaagcctttagatttcacttccagttcagtgaaatcaagggatataggaacaaggtaaacaccacaatcaggtgaatcctatattctacaggctggctggcctggtcttttccacaggtcattgtgttggagttgctcatctttatatgacaaaccaatgcaatgcatggtcctggttgagacaaactggctataagaggtcttttgggaacaactgggcaaatttgactaaggaatcaggttaattttggcaatgcaggaaaatgttcttaatttctggaaataatgcaattttttaaaatgcatactaaatgttgattactatttataatttacgctaaatattttagaatataaaaaggaggcgtttttaaaaggcaagatttccacaggttttgattttgtagggggaaattaaggagaaggtaattgtctgccaaaaaaaaacagtgcaattaagaaaaactggcttgaactagctctttccagttctacagcagatgtttgctgtactggagttatcaagaagagcagatggccctctgataaaccctgctgtgcatagactcagcaatgcagaccagcaaatagctggcatggaaaccaactgaaagggatcgaagagatttgttgaaactaggggcgagggtcagctggaaaaacaattcctgctttgcaatgatcacggccatgatttgatactttatgcaaaatcataaacaaagttaagcaactcactttggctgtacagtcagctgccttgaaggtgagcatatattttatttaatcagtaatgaaaatcctgaaaagagttgcagaagggtgcaattttgcctcatatcagtgttgttttgtgaaaggattttgagaaaagtagatggggcatgctagtggtgctattgctggcagtcacgtttcatttataacctccattatttatctggagcacagaggtgggaagaggagagaaagagaaataaaagttgtattttccatgatacaggtgcagatgagcccgcctttcaaaatagtgaagttggaggagaatcttttcatctggtggtggcaactcacctcgagggttctgtgctttcataactaatcatgttcaaccattttttaatttattcactcattcaatcactcattcattcactgttcaaataacatttatttagtgcttgactatgatagtcactcttatatgttccatagtaccctatatttatcattaataagttcaatgtagtttttgcttatttgttttggtttttttgtttgtttttgagacagagtctcactttgttgctcagactggagtgcagtggcaagatctcagctcactgcagcctccgcctcctgggttcaagtgattgtcctgcctcagcctactgagtagctgggactacaggcgcccaccaccacatctggctaatttttgtatttttcatagagatgggtttcaccatgttggccaggctggtcttgaactcctgagctcaagcgatccacctaccttggactcccaaagtgttgggattacaggcatgacccaccatgcccggccagttcaatgtagttttaatactcccttggtcattcctgtttacttgcctattccctactcaacaggacagtgaaaacatcttgttagttgttgtattctcagcatccggcacattatagaactcaaaaaaaaattgttgaatgaatgaataagtaaatgaatgtacaaaccatgctaaggtcaaaggatgcaaagatgaataagccactctcttatgttgccttgctgaatcctcttgtcaaaagtattttgaagaacacgcacatggtgtaggacagaccagcatcagattgtgctcttttaaagaagctgaagttgaagagactggaaggaggaaatggggggcatcagaaagtgaaatggcaggctgtgcaaacagaatggctcagggggcaaccctgagaaggcccagaccagagtagatgaggaagcatttaggacagaggagagagttaggactcagggtcattagcaatagacaaaagtgcacattcaaaaatgcatcattggctgggcatggtggcttatgcctgtaatcctagcactttgggaggctgaagcatgtggatcacttgagctcaggagtttgagaccagcttgggcaacatggcaaaacctcatctccaccaaaaataggaaaaattagtggagtgtggtggcgtgtgcctgtggtcccaggtactcaggaggcttaggtgggaagatcgcttgagcccgagaggtggaggttgcagtgagccaagattgtaccactgtactccagcctggataacagagtgagactctgtctcaaaaaaaaaaaaaaaaaaaaaaaaaaattaaaatatgggaaccattttaatgtcttaaaaaagtaaaaccaacacaagcattttaactgttcaactaaaacatgagtgtgggatacactatttcaaaccgctttttttttaaattattattattatactttgttttagggtacatgtgcacaacatgcaggtttgttacatatgtatacatgtgccttgctggtgcgctgcacccactaactcgtcatctagcattaggtatatctccgaatgccatccctccccactccccccacccc

SEQ ID NO: 94640 - DNA, 40702 bp, Homo sapiens
  misc_feature (1)...(40702): n = A,T,C or G
ttcaccatgttggccagactggtcttgaactcctgatctgaaatgatccacccactttggcctcccgaagtgctgggattacaggcatgagccactgcctggccgaaaaaaaaaaaaaaaaaacttttataggattttttaacttaaaaagcattcataggtacaatattcctttaaatataggacaggggccaggtgcagtggttcacgcctgtaatcccagcagttttgggggctgaggcagcggatcacttgagttcagaaattcaagaccagtctgggcaacatggagaaaccccatctctacaaaaaatacaaaaattaaccaggcagggcacacctgtagtcccagccacccaggaggctgaggtgggagggtggcttgggcccaggaggttgccgtgagctgagatcttgccactgcactccagcctgggtgacagagccagaccctgtcataaataaataggaataaatagcatggggaagggaaataatatatgctgaatacttgtataacaagcacatacacactcatttaaccttttttttcttttttttttttttttttttgagacagggttttgctgtgttgtccaggctggagtacagtggtgagattatggctcactgcaacctccacctcccaggctccagcaatgctcccacctcagcctcctgagtagctgggactacagacgcgcatcaccaggcccaactaacttaaaaaatgtttcgtagagatgggatcttgctgttttgcccaggctggtctcaaactcctgggctccagtgatcctcttggcctcccaaagtgccaggattacaaatgtgagccaccttgcctggcctcatttaatctttgcaactctaagaaatagatgttattcctattttatagatgaagaaactaagctcagagagattaagtgtcttgctagtcagcgaggagccaagacttcaaccccagtgatcctctaatccgtagtccagtcatcctctaatccctagtccagtcatctttctgttatacctcattctatgtagtggagtctccaagtggctgtataaagtagcactttttaaatatggcttgaaaaactgtctccaagtttgaatgtatgccctctgattctagtaatctgtagtggaaaagcattatatcctctgttcagccatttttcctgactattccttataagacaccccttttacctttctggtcattttttgtttgtttttgctgttgttgttgtttgagacagagtctcgctcttgcccaggctggagcgcagtgatgcaatctcggctcactgcaacctctgcttcccctgctcatgtgattctcctacctgagcctcccaagtagctgggattacagacgtgcaccaccatgcccggctaattctgtatttttagtaaagacagggtttctccatgttggtcaggctggtctcaaactcccaacctcaggtgatctgcccgcctcagtctcccaaagtgctgggattacaggcatgagccactgcgcccagcctaatttttgtatttttagtagagacggggtttcaacatgttggccaggctggtctcaaactcctgacctcaagtaatctgcctgtcttggcctcccaaaattctgggattacaggagtgagccacaatgcctgggctgtagtatttgagacaagcttgctcagtcgcccaggctggaatggagtacatggagtgcagtggtatgatcatggctcactgtagcctcaacctcctcagctcaactgatcctccaacctcagccgccccagtagctgggactataggcgcacaccacctggactggctaatttttacattttttgtagaggtggaatttcatcatgttgcccagggtggacttgaattcctggtctcaggtgatcctcctgccttggccttccaaagtgctgagactaccacgcctggattataggcatgagaaaccacacccagccccctttctggtcatttcaaatgctgaatgtttgtctctcctacctttatgtattctgggagtcaccatttattatctagttcacatatggatgtgaaagtctttacagatgagtaagactatagttccttatcttttatttttatgttttttttagagaaaaggtctcactatgttgcccaatctggagtacagtggctgttcacaggcatgatcattaggcactatagcctcaaactcctgggctcaagcaatcctcctgcctcagcctccctagcaactgaaactacaggcacattccaccttgcttggcttaaatatctttttatttatttatttatttttgagacggagtctcgctctgttgcccaggctggagtgcagtggcacaatcttggctccctgcaagctccgcctcctgggtttgcgccattctcctgtctcagcctcccgagtagctgggactacaggcgcccgccaccacacccggctaactttttgtatttttagtagagacagggtttcaccgtgttaaccaggatggtctcaatctcctgaccttgtgatccacccgcctcggcctcccaaagtgctgggattataggcgtgagccaccatgcccggccgaaatatctttatagcaacacagtgagttgatgtctccaggagacagttgacagtgactcaaaaatccccttactgagttgcagctgatagttcacaattgccagatgtggtggctcatgcttgtaatcccaacactttgggagaccaaggaaggaggatcacttgagcccagaagttcaagaccagcctgggcaacatggcaagaccctgtctctaaaaaaaaaaaaaaaaaaaaaaaaaaaaatgaaaaattagccaggtgtggtggtgagtacctgtagtcccagctacttgggagagtgaggtgggaggatcgcttgaggccaggaagttgggcagcagtgagcaacgatcatgccactgcgttccagcctgggttacagagcaagaccttctctcaaaaaaaaaaaaaaaatcataatcatcatgtaagacatacagcttagggccaggygcagtggccaacctggccaacatagtgaaaccttgtctctactaaaaatacaaaaattagctgagtgtggtggcatgcgcccgtaatcccagctacttgggaggcggaggcagaagaatcgcttgaaccagggaggcagaggttgcagtgagctgagattgtgccactgcgctccagcctgggctacacagtgagactccatctcaaaaaaaaaaaaagaaaaagaaatacagcctagtaatgctgaccttggtctgaatttatagccatgccaattacaagctatgacactgggtaggatacttcatctaagtcttggttttctcttctttttattttttaataccttgaaacttagagttgttgcaaagattaagataatgcacattccaggccaggcacagtggctcatgcctgtaatcctagcactttggagaccagcctgggcaacatggtgaaaccccatctctactaaaatagaaaaaaaaaaaaaaattagccaggcgtggcggcgtgtgccacctaggaggtggaggttgcagtgagccgagatcataccactgcactccaggctgggcaacagaacaagactctatctccaaaaaaaaaaaaaaaaaaaaaaagataatgcatgttccacatttagatagtatctgcaaatagtaagggatcctccagtttaagttttagctattatctattaaatagaggcgtttggtttaccttgtagtttaagggtttaaatttagattttattagcccacttgtcctttgccactagggggtgctattgcctccctacactttaaagaggtcctcccaaggtcacaacaacctaaattctcagccttctctcccttgccccttcaagttcccaagcacttagttatacctggacctagagctcacttggctgctttattcatgccaatctttcttccttaacattctctccaacctccccaggtcccatcagtgttgagaaggaatctaggccagctcctgggagatgccagttagccgctttgatcctgtgctttccaattgcccttatagcagtcgatgtcaggattggacaacttcaaaacaagtccataaagtccccatggcactaggggctctgggacccagtgtcgagaggcttagagcattgctgttccccacccaatcactaaagctccaagacagatgatcctgtggcctctcaataattgtccctttggtagtctcatcctggggcactgaagttcagtcctgtggtctgctggttagtctctgtggataattaaccagagaaaaggaaccaggtcagactattctagggttatgtggaaatcctttatgagatgctaaatggggagcaaatattgatcagtgaagctttgaagtcaccggggtcttcaaaggtagctgaggtcagtgctcctctggagcattgcctaaagttttttcctgagacctaactatctgatccccaggccagaagagcattggttgttaggtgtgaagctgagtataaagaaaattaagaagagaaaataggggttttctatctctttttccaagtccaagctagaaactcggttctttgtaaaggagatctatctaaacctggcttaggtggatactgagacctgtgatccttgttactgctatgtggtgagataaaagggctattcacagctgggcacggtggctcacgcctgtaatcccagtactttgggagcccgaggcgggtggatcacctgaggtcaggatttcgagaccagtctgaccaacatggcaaaaccccatctctactaagaatacaaaaattagctgggcgtggtggcgggcgcctataatcccagctactcaggaggctgagatcgcaccactgcaatccagcctcagctacagagcaagatctgtctccaaaaaaaaaaaaggcttttcacttggggctggaggtttgtagataagatgctcttgtccttggggtcaatgactacgacaggcttagggaggcacaaaagtcctgaagcctcgtctacccrgaggatttagaaagtggtgcggaatatcacttcagggtcgtgtcatggtctctggggagcacaagataagagagcatagaagactgccaagtaggagaagtggcccagaggccctagagaatgtgaccaaaggggatcttcgatgaggggctagtctgcggctcctaatctgtggctaaagtggggtgagctgctgtgtggggttacgtgaccagagtggcagtgagactaatgcccatgacccagaagctgtggctggctcggaaagccttcatagtaagggcgcagttaagacttggatttcctgccattacacacagaactgacagctcacaaagcactggatattcaggctcctgcttttgcttttctccccatatcggggtctgttagtatctataatatcgtggcctctgctgacctcaaatgatctccaccgagcagctaactctggcatcctagcctgttgtccacatgatgtcacctccatggccgtgaagccattaaccaaagacattcctcaagaaagcgcgccaaggcggtagaaggatcaggcaatgatcagtttccatgatcatattacggaattggctccaaggaccttcagaggtcgagtcctggagcgtctcctttagcattcgcctcagagataaccccaaaagtgttaaggtcaaagggaaaagccaagagggaagttaactgagttatcaggcacctatttagccacccgcacttccccgcccgccacccatccacccttaattagccctaatccgggcggtccaatcctccccgtcacaactgctgtcaagkgctaaggtcccgccccgcttccataccggaccaatggccgggcccggggagagtcccttgagaggggcgggctcgggttccggccagtgggcggggcctccttgaggaccccgggctgggcgccgccgccggttcgtctactctttccttcagccgcctcctttcaaccttgtcaacccgtcggcgcggcctctggtgcagcggcggcggctcctgttcctgccgcagctctctccctttcttacctccccaccagatcccggagatcgcccgccatggctttacttactgcggccgcccggctcttgggaaccaaggtgagcagcgaggggagggagcacgccgtcccagggtggggctgaggcgaccgcaggccctccggcgccggggtctccctcccacacccgtgcgcaccctgcgcgccttaaagggccctgcgcttggctggccgccagccctgcgtgaagctacaggaccatgtgccgcgcttcccttctggctcctgggggtgaagtgcacgccgcccgccctcggcccgcagtccagaacgcgtgaggaggccgaccctgctgtcaccccgcatgtctgaaatgaaaggggaagggatgcgtggccctgaaatagcaaggagccgagacaggaacctctggtagagactagagatgtggtgttccactggagttacagtcagtttggtggagggagcgggagtgaagatatgtgctcactctggagcagtggctaatttcgtcctctgctttgtaggaagggccttgtcagttcccgaactgcctgtttccatttctccaagcctattatttaagccttcggtgaccacgccgagcacaagagtgggtccttcaggccctcctctttgtccttgggactcttgcactttttatataggaggagcttgggtggggtggagcacttctgtacaacctcctgcatgactatcatacatgattgcagaaagaaccagaaaggtgtttccaccaaactgcaagccaataaatgaagatcctcggcaagagatactaatgccaaggtcacatgaccgtcatactacttgcttacccaggttatgccgttgatcttaagtctactttatccaggaactttctctccttctttggggtcctttacttggtattgattgccttttgggacatagaaatactgttgcaggtaatgatgccttcaatttcaaattgcagtacttttagttctaagtaacttggcccttttagacagaaactgctgtgctgagggagtcccagccctctaatccaagcaggggacagtcccacaagtgaccttgacttctgcaaagaacttagtttttcctgcggataatttaaagctgacagcatctgaaggaaaggaaagccttaggatggttttggcttgctgtatgtaatttttttttttttttgagacaggatattgctctgtcactcaagctggagtcttgtggtgtgaccaaggctccctgcagcctccacctcctgggctcaagcaatcctcccacttcagcttcccgagtagctrggaccacaggtgtgcaccgccacgcctggctaatcttttttgatttttagtagaggcagcgtctccttatgttgcccaggctggtcttgaactcctgagctcaagtaatcttcctgcctcggcctcccaaagtgctgggattacaggtgtgaaccactgcacctggcctgctgtgcgttatttttcatggttggcacaaagtgaaatttgtaagatttaccttggttcttccaggcacccagtggcaagtactagctgagcatttgggagatgcttgtcttacttggctgttgcttctcctgctgctggggaaaagggtaaggaaacctcttgggaaatgaagcaagttctagatagcgttttggcagaatgggggacactataattagctcatttctgagctgctaacccagaccagatagtctaaccctgcagtgaatgtgaaaaagccttgggatttacctattgaatttattttcctccttaagcccatagggaagctcagaacacttttgggatgacagagctacataattatggtaccattattttcctgttagagatggcctgacgatcctagtcacctatcagttgaaagccattagaaggcttttgacccttaaaagtaggtcaggtgcagtggctcacacctgtaatctcagcactttgggaggcagaggcgggtggatcacctgaggtcgggaatttgagaccagcctgaccaacatggagaaacctcatctctacgaaaaatacaaaattagccagacatggtggcacatgcctgtaatcatagctacttgggaggctgaggcaggaggatcgctcaaacccaggaggcggatgttgtggtgagcccagatcgctccattgcactccagcctgggcaacaagagcgaaactccgtttcaaagagaaaaaaaagggcggggggggtagcaaagcccaataatgagtttattggactggaaatctcctgagaaataagcaatatgaccagggtaccaagaagcttgttggcttgtcagcattgctagcacctgcctgtgctttctagattagcctgtggataatgctagtcataattggtaattttacttttgctagtarggtagactttgggaggcagtaatttcctaccagggagaactgactcttaccactttgagtctcagcgtcaggtgtagttttacttttctgagaagaaatttttttttgttttgagacagagtcttactctgtcactcaggctggagtgcagtggcgtaatctccgctcactgtaacctctgcctcccaggctcaagcgattctcgtgactcagcctcctgagtagctggggttagcaggtgtgcaccaccacgcccagctaattttttgtatttttggtagagacggggtttcaccatattggccagactggcgaatttttttaaccttactaggagacaacatgtgaattagtcattgttctattgttctactctcactgtcacataatttaaatgtcacataatttaaaacacctgagttagaagctaattcagagagctttgagattatttgacttcttgtttatccaaattcattaatgctaagcaatggccttagtattatctgtgggtgactcagttttgtgacatcaaaaatgtcttttcacagatgatctgggtttggatttgggctaggaattgaagtagggctgcagttcacttctggacttttgaagtcaacatgcttaaccaaccctagctaaagggaactgtctcttgagccactgaaaattgcttctccaagctagtatgtttgaaactgagtaaatcaattcaaagatgtttctagattacttctagactttttcaagacacttaaatgcaaaggaaccaatggtttctttacattggacttataccactgtacaacatcacctgtataagtcctactcagaaattgggttcaacaaaaccgagttggttttgtcctgcaaaatatttagttaggttttaaagcccaaattttttaaaggtaagggctcatatctctgtgccctcactttgactatcagcctacccaaagtaacggtgattccttgatactagaatggcaggggaagccttatggggtgttagtggtgagatgactgcatttggtcttcccagtggcctttaggttggtagcaggtgaatgaatgcatggggaggcagcaagaatagtatggtaggtagcagcgatagagttggcattcctgacttaaaatccaaggggcagcagaagggaaaccagacttggtggatttcaataaagccacacaatgattctttctgccctgtgtcaatactttatgcaacagagtaggatgtgaaatttaaaaccgtaatgaggcaactgtagcaatagatctttcttagcatctgattatctttcagttctggcttcaactgtgcttcaactgcacaagttccttagttctctgttttgggttttttttggggggtggggctggagtgcagtggtgcgaacatggcttgctattactacagcctcaacctcatgggcccaagcaatccccccgagtagctgggaccacaggcacgcacagccacgcctggctaatttttttgtagtttttttggagacagtgttttgccatgttgtccaggctggtttcgaactcctgggctcaagcaatccaccagtctcagcttcccaaagtgctgagattacaggcgtgagccactgcacccagccctctgtatttcttttaacatgatgctattttaaaaggtctgtaaactcacagtgggcattgtcacctgtaatgcttgcttatgttgcagtttcctggatcctaccttcagattayaattctgcaaagtaggatgggatctggaaaagtttcttgtaaatccctaaagtgtcagggagttaaaacttgtaagaacttctttttttttttttttttttttttttttttgagacagtttggctctgtcgcctaggctagagtgcggtggctcgatcccggctcactgcaagatccgcctctggggttcacgccattctcctgcctcagcctcctgagtagctgggactgtaggcgcccaccacctcgccccgctaattttttgtatttttagtagagacagggtttcaccgtgttagccaggatggtctcgatctcctgacctcgtgatccgcccgcctccacctcccaaagtgctgggattacaggcgtgagctgccgcgcccagccataaaacttctacgaacttctagcagaagtaagggaatagtttctaattcctgagaaagtattatgatgacagatcctatattctttattcactagtatatacttagtgtacacataataagtaggtgttcaagaattttttttttttccttgagatggagtctcgctctgtcacccaggctggagtgcagtggtgtgatctcggctcactgcaacctctgcctcccgggttcaagctattctcctgcctcagcctccctagtagctgggactacaggcacatgccaccacgccgggctaatttttgtatttttagtagagatggggtttcaccatgttggccaggatggtcttgaactcctgacctcgtgatccacccgcctcagcctcccaaaatgctgggattacaggcatgagccaccgtgcccggccaagaaatatttattagctaggcatgatggcttatgtctataattccagcactttgggaggctgaggtaggaggatcacttgagcccagtagtttgagatcagcctggcaacatagcaagaccttgtctcttaaaaaaaaaaaaaaagttcattaaattaaagtacaataagtgttggccaggcacagtggctcacgcctgtaatcccagccctttgggagactgaggtgggcagatcacttgaggtcaggagttcgagaccagcctggccaacatggtgaaaccctgtctctactaaaaatacaaaaatcagccaatcgtggcagctgcctgtaatcccagctactagggaagctgaggcacaagaatcacttgaatccgggtggcagaggttgctgtgagctgagatcatgccactgcactccagcctgggcaatagagtgagactcgtctcaacaaaagaacagtaagtgttcctactgaaaggaaagtttaatacttgtgattcctggctgggcatggtggcaggcacctataatcccagctactcgggaggctgaggcaggagaatcgcttgaacccagggggtggaggtttcagtgagccgagatcgcaccactgcactccagcctgggtgacagagactctgtctcaaaaaacaaaaatagacttgtgattcctttctgaagatggaagctggaggagtatcttttgcagtcctccttactgagtgatcagtgcatcttttttttttttttttttttttttgagacagagtcttgctctgtcgcccaggctggagtacagtggcatgatctcggctcactgcaacctctgcctcctgggttcaagcaattgtcctttctcagcttcccggttagctgagattacaggtgtgcgccaccgtgcccgactaatttttgcatttttagtagagacagggtttcaccatcttggccagactggtcttgaacccctcacctcaggtgatcggcctaccttggcctcccaaagtgctgggattacaggcatgagccactgcacccagcagtgatcggtgactattcacgtgaagagactgttggaaaatgacagttaggtagaattattaaggaaatgtctgtaagtatgaaggaggtcaaagtatgaaatctgtagattgctcaggcttttaagtggcctgaccatgtagtgccaaaccgacttccagtatcaccgttgtgaaacacacacattaaatggctttagttctctgacctggttctggggagagaggagcctttgtcctatttgtgttcgtgttctctgaatgcaagttgttccttctgcattggaagtgtctgtagtacaggattttttcctactggttattagtgtattgtgtttgctccatcagctaagccagtcctgctggcttggcaagctctgatcttttgttgatgaaggacgaagtccctgttaaaatcaggagcttcttccgcaaggtttttctgttttgttttctaattttttttagtattattattttgagacggagtcttgctctgtcacccaggctggagtgcaatggcgcaatctcagctcactgcaacctccgtctcccaggtccaggcgattctgcctcagcctcccgagtagctgggactataggcatgtgccaccacgcctggctaatttttgtatttttagtagagatggggtgtcaccatgttggccaggctggtcttgaactcctgacatcaggtgatccacccaccttggcctcccaaggtgttgggattacaggcgtgagccaccgtgtccagcctgttttctaattttttaaattattttttgtagagacagagtcttgctttttaattcagaaatgctgggattataggcatgagccactgcgcccagcctcccccaaggttttaatgttggttatgtggatatgtggtaggacatatcctggatatgcagaaggacagagagagtctggatgtacctaggatggagaatcaaagaaaatttggcttcttgactgtagggtgagggtgctagatgtggaacagtgatggtaataggctaaggagtaagaggaaaataacctatattgagtaagtgggctttttttgttttgttttgttttttgagacagagtctcctctgttgcccaggctggagtgcagtagcacaatctcagctcactgcagcttcagccacctgggttcaagcgattcttctgcctcagcctcctgtttgaaatgcttgttccctggtgctgtaaagaaatagcacttgaacataaatttaattaatttaatttaatttactcagcaaggcctttttttttgagacagagtctcactctgtcgcccaggctggagtgcagtggtgcgaactcggctcactgcaagctctgcctcccaggttcacgccattctcctgcctcagcctcctgagtagctgggactacaggcgcccgccatgacgcccggctaattttttttttttttttttttttttgtatttttttagtagagatggggtttcaccctgttagccaggatggtctcgatctcctgacatcatgatccgcctgccttggcctcccaaagtgctgggattacaggcgtgagccaccgcgccaggccatcaaggccatttttatactttctgcagaaagggtacacgccagcagttttgccacgagagtacaccgagcaaaggagacagggtcatttataccctgatgcatccaccctactgctgtgtccagttccagtttccattggctggaatgggacctcacattttgtatttgtcctgattggctagcaacttagaacttttttttttttttttttagaccaagtcttgctctgtcagccaggctggagtgcagtggcacaatctcggctcgctgcaggctttgcctcccggagcttctcctgcctcagcctcccgagtagctgggactacaggcacctgccaccacacctggctaattttttgtattttttaatagagacggggtttcaccatgttagccaggatggtcttgatctcctgaccccgtgatctgcctgccttggcctcccaaagtgctgggattacaggcttgagccacagtgcccagctgcaacttagaacttttttaaagaggcaaaggcagaggagaacaaaggaaggtgtgagtcaccatacctggcctcttttaatttttatattttttcatcttaccacatttgagggctacagcccacctctatcaataatagctgactcactagaggagttcttgtaaggggtggcaacaaatgagctcttagtgattgtgggggaaaaacctcttcgtgattgtgataacgccacctccaccctatagagaatactggctgtcagacattgtgagccaggcccttgtctttggaagtagccctctccatctctccccatgaaggagctgacctattgagtgagatgactgcctgattctcctgagagctgctgttccagtaaggtgactctacaggtggcatgcatccagaagccaaaagcccaactgtcacacctccaggattaggggagaatctgggaggtagaagttcagggatgattcagaggtttgtaatctacctgtctcatcaatgaacataacctgaatgtactgttcagagccattcagcagctttctttggcagccacggggtagaggaaatgaaatgtagcctttgatgttacagtcctcaagcacctcctgtctagagtcatttgctctgctggtggccatcagggttagttaaatttgtttcctctccctgagatgcctcccttcttggtcaagaagcccttaaaaagaaaactggtatcttttccttgatgcctgttaaaaaaaaaaaagaaagaaagaaagaaagaaaattgggactttattttgtattccacagctggaaggaattatccattcacctctgcctcaggcttgactgcctctttcctgggatccaactcccaggaagttctgacacttgatggtaggtgataggccaacacatttgtaagaaacaaatatttactgaattcagctatgcacaaagcactgttctagatgcttttatgaaaattrttttatttagtttacttaactactctgaaattggcttttattattaccattttagaaatgtaaaaactgagacttagaaattaggttacatagccaagataacacagtgggaaggtggcagaacgttcatttaggacttggtccttggtaactccatatctaaactgtttggattcagtaagtctgaggcccaagaaatgtaaatacttctggcgaggaggtcacattttaagtaacaagacttgactacttttgcatatacgtccttattggaacctgagaatcagactctgagttaagtagtttaagtgttatcttaattatggaaatgggaagagaaatagtagttcattgttttcctttggttgtcttaattagtaatggagctaggactagaacccagacttcctaactccaaattaagtgctctgtactctacatcattagataaagttgtcctaagttgaattttttctactctacccttttgagcaatcttaccaatgaattgctgcctttaaaattcctctgataactttttttttttaagcttcaggtttagcaaaaaacatgactgaacctgacaccgaacggtgctagaaagtggctatcaggctgagcgcggtggctcacgcctgtaatcccagcactttgggaggccgaggtggtggatcacgaggtcagaagttcgagaccagtctggccaacatagtgaaaccccatctctactaaaaatacaaaaaattagccgggtgtgttggtgtgcacctgtaatcttagctactcaggaggctgaggcaggagaatagtgtgaacctgggagagggaggttgcaatgagctaagattgtgccattgcactccagcctgggtgacagtgtgagactccttctcaaaaacaaacaaacaaacaaaaaaacataaaatcttccgggcactgtggctcatacctgtaatcccagcactttgggaggctgaggcaagtggatcatttgaggtcaggagtttgagaccagcctggccaacgtggtgaaaccctgtctctactaaaaaactacaaaaattagctgggcatggtggcgggtgcgtgtagtcctggctactcgcgaggctgaggcaggagaatcgcttgaacctgggaggcggaggttgcagtgagccaagatcaagccactgcactcagcctgggcaacagagcaagactcggtctcaaaacaaaacaaaacagaaagtcagctggttgcagtggctcatgccggtaatctcagcactgtgggagactgaggtaggaagatcgcttgagcccaggagttcaaagccagccggggcaacatagcaagacccccgtctctataagaaaagtttaaaagataaaattagctggccgggcgcggtggctcacgcctgtaatcccagcactttgggaggccgaggcgggcagatcacgaggtcaggagatcgagaccatcctggctaacacagtgaaaccctgtctctactaaaatacaaaaaattagccaggcgtggtggcgggtgcctgtagtcccagctacttgggagcctgaggcaggagaatggtgttgaaccttggaggtggagcttgcagtgagctgagatcgcaccactgcactccggcctgggtaacatagcgggactccgtctcaaaaaaaaaaattaattaaattaaatttaaaaaaaaatcaccacagcaaacaaccaccctcaattaaaaggtctcctgctgggctgatgtagtctctgggacatggggcctctctagtagggaatctgtgggactctaaaccatggaatagcttgaacaaggttaactctgtagaacaatagtttgaacttattaacatgttttctttgcccactttttttgtgaaagaaagggcaaagttacatcttcagtgctgggttcagcttcctgtttgcccatgtagggtgcaagggctatgaagggctgtttgtgctgcctattttcttgctcaagtgatcctcagtaagatagaggagactcttgaggaagttaagaaaaggagttaaggacagccctggtaacaagttgaggtgttcctcgtttgctttaggaacatactggcttggtctatgctctctgaatttacctttggattgattcttttaaaagtaatcttttctgtctgggtgcagtggtgcatacctgtaatcccagcactttgggaggctgaaaatggaggatcacttgagcccaggatcactcgaggccagcctgggcaacagagcaagaccccatctctacaaaaaaaaattttttttttttaattagctgggcttggtgatgtgcgcctgtaatcctggctactcaggaggctgaggtggaagtatcacttgagcccaggaattgaaggctacagtgagctattaacatgccactatactccagcctgggggaaagagtgacctttctgaagggcctcttttcattcctcctctccgtcccaacagaaataggggaactaaattttaaaaattctaaaaatctgggaggccraggtaggcgtatcaccagatgtcaggagtttgagaccagcctggacaacatgatgaaactctgtctctactgaaaatacaaaaattagccaagcatggtggcgtgtgcctataatcccagctactcaggaggctgaggcatgagaatcacttgaacacgggagccagagatcacgccactgcacttcagcctgggcgacagaatgagactccatctcaaaaaaaaaaaaaaaaaaaaaaattctaaaaagccttcagccctatagaactctcaccccaggcaggtagcaattttttgcacagagagcagtgcagtagttactagaaaaggtgcctctggtcttttgacaaaaggacaggtgcagccttgctccaggattagtttatttctgtgtgtaatcttctaagtctgcaaagcacttttatatccactgtaatttagttatcatgggactattctgtgaggtgtgtggtgagtattagagccattttatagagcaggaaacttaggcttaatttgattatctcaatttgttttcaaaatctagtacagaaaaattaatttccttgcctcaggccgtattcctagttagtaacctgattggtcatcttatttcaaagttggtgtatggcctggcatggtggcttacgcctgtaatcccagtgctttgagaggccgaggcaggcagatcacctgaggtcaggagtttgagaccagcgtggccaacatggtgaaaccccgtctctactaaaaatacaaaaaaaattagccaagcatggtggtgcatgcctgtaatcccagctactcaggaggctaaggcaggagaatcacttgaatccagaaggctgaggttgcggtgagctgagattgtgccattgcactccagtctgggcaacaagagtgaaactgtctcaaaaaaaataaagaaaaggaaaaagaaaactcacaaagttggtgtggaacttttattgcaacttaacaatcttctcacagatgtattttttatttgaggaaaaaagaaactacctgtacacacagaaaagcataaactagctaaactattttctctctctctcttttttttttttttttttttttttttttttgacagagtcttgctcatttgcccaggctggagtgcagtggcacaatcttggctcactgcaacctctgcctccaaggtttaagccattctcccacctcagtctcctgagtagctgggattacagctgcctgcccataccacgcctggctaatttttgtatttttagtagagaagggtttcaccatgttggccaggctggtcttgaactcctgacctcaggtgatccaccgcctcagcttcccaaagtgctgggattacaggcatgagccaccgcgcccagccaaactaattattttcttttgacactcttagaaactttgcaagtttccatttctgctaatgagtagtcttctgtcagcttctttgtagataatctttgtgctttttccaggagggtcagaagtaccgttatgaaaggctgccctctgcctgtggtctttcccagattagagaggttgaagtgctgtcgaaagaccaggtgcaggagagatcttaccagcagtgttaagtaattgctcartttcctcatttgttttccttggggtcactcaaaaatattgataaccgccctgctctggagcccagatgatgggaaagagtctgtcttcaaggaatgctagtgaagctayggatgaaaaaaagcagttaaacctcctgctgtctccatagtggtaactccttccaaactgtttggggacttttacagctttcttatgtcaaactgccctaagagrctgagatgaagagagagaggttgagtcactgtaattccttcttgttaatataaaagagggaggggtaacagttacataaggttctcttttttgctttgcagaatgcatcttgtcttgttcttgcagcccggcatgccagtgcttcctccacggtaaggtttggaaaagaagactaagaataagaatcattgcggccagcctgaccttggggcagaggatttggcaaccacctggcctcttattatcctgagtatttcctggaagtgtttgttactattgttattgttatagctgctattattattatattactatttaacaaataatttactcagtggtatagtgagatgggaatatcaatacatttgcctaattcttttaaatgttttaagtagtgtaaaatatacataacataaaatttaccattttaatcatttttaagtatatggtttagtggcagtagatatgtttacattattgtgcaaccatccatctccagaacttttgtctgcccaaaccgagaaactgttcccattaaacattaactcctcattccttcttccccctgcctaattcttttaccctcatttgtgcagagtagttgaccagacttccctggcagataaagccagcttctaaaaagcaaattcttgacacacctactttgcaggaaatctaataaacttttagaccattgcttagtccttctacttttctttttagaatttgaaagacatattggctgacctgatacytaaggagcaggccagaattaagacyttcaggcagsaacatggcaagacggtggtgggccaaatcactgtggacatggtaagggttgtgtggctttggctgggaaaagtagctctgtaatgtgcttcaacaaaagtaacattctctccactgactattcaaaagcattctgtcccataggccctgtaggacagctttaggatgacttttccccatccttcagattctgagcagctcagctgatagtttctcaacagtttttagcttattggtctccatccccttctcctagactagaactcattctgtttgttttgattggttggaatttgagggtagggtatgttggggagtggttgagtgggcaggagaaaaaaagtgaaatacaataagaaaaggaatcaaacagagggcgcaatggctcatgcctattatcccaacattttgggaggctgcagttggagaatcacttgaggccaggagttaacaaccagcttgatcaacaaaggaagatacaatctctatgaaagaaaaatttaaaaaattagccagagatggtgggatgcccctgtagtcccagctactggggaggcaaaggcaggaggattgcttgagcccaggagttcagggctgcagtgagccatgattatgccactgtagtatagcctgggcaacagagggagaccctatctccaaaacaaacaaaaagaaagatagtgatttctcaacttaaaaaatttcatttccaggcctgttgcagtggctcatgcctgtaatcccagcactttgggaggctgaggcgggtggctcatctgaggtcaggagttcgagaccagcctggccaacatggtaaaactccgtctctactaaaaaatataaaaattagctgggcatggtggcaggcaactgtaatcccagctactcaggagcctgaggcagnnnnnnnnnnnnnnnnnnnnnnnnnnnnnnnnnnnnnnnnnnnnnnnnnnnnnnnnnnnnnnnnnnnnnnnnnnnnntcggctcactacaagttccgcctcccaggttcacaccattctcctgccccagcctcccaagtagctgggactacaggcgcccgccaggacgcccagctaattttttttttttatttttagtagagacagggtttcaccacgttagccaggatgatcttgatctcctgacctcgtgatctgcctgcctcggcctcccaaagtgctgggattacaggcgtgagccaccgcgcccagccaatttttatattttagtagagacagggtttcaacatgttggccaggctggtctcgatatcctggcctcatatgatctgcccgccttggcctcccaaagtgctgggattacaggcgtgagccactgcgcccggcctaaaccccatttctttaaaaaaaaaaaaaagaaatacaaaaattagccagacatggtggcacgtgcctataatcccagctactcaggaggctgaagtgggtggatcacctgagcctgcaagtcaaggctgcagtaagccgtgattgtgccactgtgctgcagcctgagtgacagactctgtgagaggcttagtgatcttccctcctcctcagcctcccaaagtgctgggattacaggcatgagccccaccgtacctggccacaaagtttgtttttttttttctttttttttttttttttgagatggagttttgctcttgtcacccaggctgaagtgcaatggtgtgatcttggctcactgcaatctctgccttctgggttcaagcgattctcctgcctcagcctcccaagtagctgggattacaggcacatacaccatgcccgctaattttttaatttttagtagagacatggtttcaccctgttggccaggctggtctcaaactcctgacctcaggtgatccacctgcctcggcttcccaaagtgctgggattacaggtgtcagccactgtgcctggccacaaagtttaattctttagtaagctgactcctcagacatctctcaccaaatgaagtcttacaagtctgagaataaattttctctcccagatcccatgaagctctaacaagttctagtctgaatcattctgattactggccacagcctcttttttttttccttctttcttcatcctctttagatgtatggtggcatgagaggcatgaagggattggtctatgaaacatcagttcttgatcctgatgaggtaagacatcttcatgtcaattactaataatcattgagtttgtgcaaatacgcaaaccgtggattagaccagtaagggtaagcacaaaacagagcacctagcttcatatattggaaggtagagaagacatatgtatggaataattgaagaacaaatttaccttttaaatatatcaactagtaaaaataaaagtacaaaaccagaggtaagttatgtgaagatttaagcttaatttaaagttctgttctggactgggcgcagtggctcacacctgtaatcccagcactttgggaggctgaggcgggcagatcatgcggtcaggaggttgagaccgtcctggctaacacggcgaaaccctgtctgtactaaaaacacacaaaattagccgggcatggtggcaggcacctgtagtcccagctactcgggaggctgaggcaggagaatggcgtgaacccaggaggcggagtttgcagtgagccgagatcgcaccactgcactccagcctgggcgacagtgtgagactccrtctcaaaaaaaaagaaaattaaaaattgtattctgggctaggcatgatggcttgcccctgtaatcctagcacttttggaggccaaggtggagcattgcgtgaggccagaagatcgggaccagtctgagcaacatagcaagaccccacctctacagaaataataattaacataaaaagttctactctaacttgttgtaaggtctgatgagtaagaccagtcgtgtgacttctaggctataaacttgagttgtaattctctctctcctctctcaagggcatccgtttccgaggctttagtatccctgaatgccagaaactgctacccaaggctaagggtggggaagaacccctgcctgagggcttattttggctgctggtaactggacatatcccaacagaggaacaggtaaagcagaaggatattattagctcttctcattccccttcttcattgcctttctctaatctcagacacttaatgctgatccggcatttatagagatgcgtagtgaagggaaggaatcagcagagttctgctgtataaatggattgggttgacctctcttgggttttctttactcagatgttgctgtccttttttatttttctccttccttgtccttgctggtgttctgagcactgtctctttttccacaggtatcttggctctcaaaagagtgggcaaagagggcagctctgccttcccatgtggtcaccatgctggacaactttcccaccaatctacaccccatgtctcagctcagtgcagctgttacagccctcaacagtgaaagtaactttgcccgagcatatgcacagggtatcagccgaaccaagtactgggaggtaggaaatttgggtggggtgatcggtgtgtgatggggattcaaaggacttgagtgtgaagggagggaaaaaatacagaatctttagaaaaattacctctgagttaatcagaaactaacttaacagattttcattggaggcttgttttttgtcagttgttggaattacaaagctaagtagagcatggtttctatcaccaggactgtttgtttggttaggctgacacacgtgcagaaaaaagaaattattaaaattccatagtcggccgggcacagtggctcatgcctataatcccagcacttggggaggccaaggcgggcagatcacgaggtcaggagttcaagactagtctggccaatatggtgaaaccccatctctactaaaaatacaaaaattagccaggcgtgatgccgggcgcctgtaatcccacctactcaggaggctgaggcagaagaatcacttgaacctgggaggtggaggtttcagtgagccgagatcgcaccactgcactccagcctgggcaacagagtgagactccatctaaaaaaaaattccatagtcttgctgtaacagaggtatgtacacatggctgttgaaacggaaaagagacctaggtaggtggctcacacctataatcccagtgagtcatgatgctgaggtgggaggattgcttaaggccaggagtttgagatcagcctgggcaacatagtgagatcctatctgtacataaaaaaggagaaaacaagaaaagaaaaggatgtgacttaactgcagggtccctgaggaaggtttcacagagcagtctcatgctagcaccagagggtcactttccctcactatcttcttcaaatacagaaaactttgagaaatcttacaagttgggagaacagcaattgcaactctggagtctaggaggactaatgccagtcagtcatgttctcggctagccaacctaagatacccatcaggagtgggagagtggttagtatccttggagtaggctccagatccagaaacaaatgagctttattctctgaaaatgaaaagtgtccttaatagtttacaacgctggttggggtatggaaagattgtttcttatcccaatgcatagtacataattccttccatcctcttctagtaccccacaaactcagaaacactgggtaaaagtacaaatgatctggctaggtttacaggagaatgtaccattttcttttgttccttatttggagataggtagtataggaacagaaaattttctttttacaaagcaggtacattaaatgatttttggccaggaggtgccagccaccaggaaggccctaaagagttcactgtggtgcaagacacagaagagcatgacccactgctctgatgcaaccaccttgggtccttggcaaatctagattgatttagttggtcaatattaatttggcaycaactgtgtgtagagaattgtgtttgcagttgaggaagacagagagcatttaaaattgatattaacttggttggcattggggagttggtatcagaatgatgcaaaatatacacattcacaccacataaagcatttatttataaaggcttatttataaacactttaggtggtatgaatgtgtatatttgtacctgcacacattagcaggtacaaaaggtcatataatcttaatattttgtttttcattttatttatttatttatttttttgagatggagtctcgctgtgtcacccaggctggagtgaaatggcatgtgaaccaccgtgcccagccatttttatttttatttttttagaaataggtctctctctaatcacccaggccaggatgcagtggcatgatcatagctcactgtaaccttgaactcctggactcaagtgatcctcctgcctcagcctcccaagtaacaaggactacaggcacatgccaccatgtctagctggcattacaggcgcacaccaccactcctggctaatttttgttgtttttttttttttkttttttttttgagacggtgtcttgcactgtcacccaggttggagtgcaatggcacgatctcagctcactgcaacctccacctcctgggttcacacaattctcctgcctcagcctcccgagtagttaggattacaggcgcacaccaccacacccagctaactttttgtatttttagtagagacagggtttcactatgttggccaggctggtctcgaacctctgacctcgtgatctgcccacctcggcctcccaaagtgctgggattacaggcttaagccaccacgcctggccttgtctttttaatagagtttcaccatgttggctaggctggtctagaacggctggtccagaactcctgacctcaggtgattcgcccacctcttccccaaagtgctgggattataggcgtgagccaccaccctgggcctttttgtttgtttgttttgttttgttttttgagatggagtctcgctctgttgcccaggctggagtgcagtgacacaatctcagctcaccacaacctctgcctcctgggttcaagcgattctcctgcctcagcctccccggtagctgggactacaggtgcgcaccaccacgcctggctaatttttggtttttgcttttttgcttttgttttgtttttttttggttttttttttgagatggagtctcgctctgttgcccaggctggagtgcagtggtgcgatctcagctgattgcaagctccgcctccctggttcaagcaattctcctgcctcagcctcccgagtagttgggactacaggcacccgccaccatgcctggctaattttttgtatttttagtagagtcggggtttcaccgtgttagccaggattgtctcgatctcctgacctcgtgatccacccgcctcagcctccaaaagtgctgggattacaggcgtgagccaccgcgcctggccttgtgtttttaatagagacggggtttcactgtgttggccaggctgatcttgaactcctgaccttgtgatctgcctgcctcggcctcacaaagtgctggggattataggagtgagccatggtgcccagccttcttgagcttttaaggagttgtttttacatataccttaagaggatgatcttctgcacagaacatttcttctataataatttccattaactctagatgaatagtgtaatctcttgagttgaaagagtttaactagcttctaggcctctaattgacttaaggtcactcagaacaaggagattgattgctctgatgcaaccagctgtttaattgtgaagtagccttaagctgttgaatttagtcaaatttgtgaagtagctgacagatcaagttttgctagtaggccaggcgtggggactcatgcttgtaatcccagcactttgggaggccaaggcaggcagatcacttgaggtcaggagttcaagaccagtctggccaacatggcgaaaccccatctctacaaaataatacaaaaattagctgagcgtcctggtgcacacctgtaatcccaactactcaggaggccgaggtgggagaatcgcttgaacctaggaggcagaggttgcagtgagccaagatagcaccactacactccagcctgggtgacagagcgagactttgtctcaaaataaaataaaccaaaaatatatgctttttatttaccaactttttttttttttttccgagacagagtctctgtcgctcaggctgcagtgcagtggcacgacctcggctcactgcaacctccgcctcccaggttcaagcaattttcctgccttggcctcccgagtagctgggaccacaggtgcaagccaccacgcccatctaatttttgtatttttagtagagatggggttttgccttgttggccaggatggtcttgatctgttgacctcttgatccgcgctcctcagcctcccaaagttctgggattacaggtgtgagccaccgtgcttggcctgtttatcaactttttaaaaagtgacatgggctgggtgcagtggctcacgcctgtaatctcagcactttgggaggccgaggaaggtggataacctgaggtcaggagtttgagaccggcctggccaatatggtgaaaccccatctctactaaagatacaaaaaattaggcatggtggcgcacgcctgtaatcccagctactcagaaggccaaggcacaagaatcgcttgaaccccggaggcggaggttgcagtgagctgagatcgcaccattgcactccagcctgggcgacagggtgagactccgtctcaaaaaataaaagtggcatgagttaataatgtaagctaggtaacgcttcttggctacatgggtgaccttgtgcaagttaacttagctaagccccaatttcctcatttataaaaagaggtatatgttaccttacaggattattgtaagaaaagaaaaagtaatactgcaaatagatagcacagtacctgttgcatagtaagtgcttaaagaatggaagcctcggccgggtgcggtggctcactcctgtaatcccagaactttgaggggccaaggtgggcaaatcacctgaggtcgggagttcaagactaacctgaccaacatggtgaaacccccctctactaaaaatacaaaattaagccaggcatggtggtgcatcctgtaatctcagctactcaggaggctgaggcaggagaatggcgtgaacccgggaggcggagcttgcagtgagccgagatcgcgccactgtactccagcctcggcgacagagcgagaatccatctcaaaaaaaaaaaaaaaaaagaatggaagtctttgttattaaataacaattgcatatcactgtttgatccttggcacatacagtgaattttctttgaaagatggaacatagaattcattattaaaacctagtgtcttttttttttattttttgagacggagtctcactctgtcgcccaggctggagtacagtggcacgatcttggctcactgcaagctccacctgccagattcacgccattctcctgcctcagcctcccgagtagctgggactacaggcgcccaccaccacgcctggctaattttttgtatttttagtagagacggggtttcaccgtgttagccaggatggtctcgatctcctgacctcatgatctgcctgcctcggcctccgaaagtgctgggattacaggcatgagccactgtgcccgaccccttttttttttttagacagagtctcgctctgtggtccaggctggagtgcagtggcactatctcggctcactgcaacctccacctcccgggttcaagcaattctcctgcctcagcctcccgagtagctgggattataggcgccggcccacaccacgcctggctgattttttgtgtttttagaagagaccaggtttcaccatgttggccaggctggtcttgaactcctgacctcaaatgatctgccagcctcagcctcccaaagtgctggcattataggcatgagctgccgtgtctggctgtaaaacctgctgtcttaacacattgaacgtcaagtcatggtgtagtgaaaaagatcatgattaaacatatcagagggccaggcatggtggctcacacctataatcccagcactttgggaggccaaggcaggcagatcacctgaggtcgggagtttctagactagcctaaccaacatggagaaaccccgtctctactaaaaatacaaaattagccgggtatggtggcacatgcctgtaatcccagctactcaggaggctgaggcaggagaatcacttgaacttgggaggcggaggttgcagtgagctaagattgcgccattgcactccagcctgggcaacaagagtgaaactctgtctcagaaaaccatatcagagttcaaacttgactttagcatttaacctaatactatgagccttagtttactcatctttaaaatggcagtcattatatactttgtagtagtaagcattgggaataatgttttagtgtacattagatagtattacaaatcacttagtgcctgggtcataatagttattcagtgaaatggttatgattgttattctctactttcaaacatactcaatatataacaacccatcatataactaaccatcaacccaaatagccccaattcatggaggacagacgatatccctgcctaattcttctttgctgataattcctttttttttctccatcttgctcctcttctgtcagttgatttatgaagactctatggatctaatcgcaaagctaccttgtgttgcagcaaagatctaccgaaatctctacagagaaggcagcggtattggggccattgactctaacctggactggtctcacaatttcaccaacatgttaggctatactgatcatcagttcactgagctcacgcgcytgtacctcaccatccacaggtaagctagacccagcaaccacagccactaggtgcctcaattggtgggaaatttttttaaaagctcctttatgttctcatcttctgagaacagatgataggcagcaagaagacagaaacgtggcataaaggatgatccaaggcaagaaaggggtctagtaagcaaggtcaggaggcctaaagaaattactgtaaccatgctaagaacaagatggtgcttctggctgggaaaaggtactagctgctcacattagatggtccttcagctttccaggagctcgctctttggggccattgctattaaagctaggttggagtcatggagcagagcatacaggcatcatcaaccagtaacctctccagctctgtggatgagtgaacaaaagctggtaatgagattaggatgcttttttttttttttttttttagatggagtcttgctctgtcgccaggttggagtgcaatggcgcaatcttggctcactgcaacctgcacctccaggttcaagtgattctgctgcctcagcctcccaagtagctaggactacagatgtgtgccaccatgcccagctaatttttgtatttttagcagagacggggtttcaccatgttggccaggatggtcttgatctcttgacctcatgatccacccgccttggcctcccaaagtgctaggattataggcgtgagccactgtgcctggccaagattaggatgtcttttacaagagtttaggtataactgactggctataggctggcatgagcccataactaggctagtaagtggcaaataagagaacagcaaagtttccataatctgccccttctttcttcccttggctctcccttcttacttccccacagtgaccatgagggtggcaatgtaagtgcccataccagccatttggtgggcagtgccctttccgacccttacctgtcctttgcagcagccatgaacgggctggcagggcctctccatggactggcaaatcaggtaagactattctttttattttcctgctacatgttttccttaccccatgctttgtttctgatcttggcattctcttctggcatatgtattaacattccctttttccccaaaccttacccataggaagtgcttgtctggctaacacagctgcagaaggaagttggcaaagatgtgtcagatgagaagttacgagactacatctggaacacactcaactcaggacgggtaagcagagatgcttaacgactaggaaagaaaccaagacacaagttctgcaatttggaagaattaagaaaagaatgaaagaggtccctaaattagagatttttttttcttcatttatctaccttgaagaatttagaaaagaatttctaggtgggcacaatggcatgcacctgtagtcccacctacttgggaggctgaggcaagaggattgcttgaggccaggagtttaaggctgcagtgtgctaagatcactcctgtgaatagccactacactccagccaggacaacacagcaagaccccattctctaaaaaacagttttaaataggttgagtgtggtggctcacgcttataatcttagcactttgggagtccagggtggatggayctcgtgagcccaggagtttgagaccagcctgagcaacacagaccctatctttttttttttttttttttttaaagacagtcttgctcttgttgcccaggctagaatgcagtggcgcaacctcagttcactgcaacctccgcctctcgggttcaagtgattctcctgcctcatcctctcgagtagctgggattacaggcatgcgccaccatgcccggctaattttgtatttttagtagagacggggtttctccgagttggtcagttggtcaggctagtctaggactcccaacctcaggtgatctgcccacctcagcctcccaaagtgctgggattacaggcatgagccaccgcacacggccagaccccatctttaccaaaaaaaaaaaaaaaaaagccagatgtgttggtgtgcacctgtggtcccagctactctggaggctgaagtgggagaattgcctgagcctgggaggtcgaggctgccgtgagatgtgatcatgccactgcactccagcctgggtgacagagtgagatcctgtctcgaaaaataaaagaatttctactgagaatactatcttttttcctcactctttacaggttgttccaggctatggccatgcagtactaaggaagactgatccgcgatatacctgtcagcgagagtttgctctgaaacacctgcctaatgaccccatgtttaagttggttgctcagctgtacaagattgtgcccaatgtcctcttagagcagggtaaagccaagaatccttggcccaatgtagatgctcacagkggggtgctgctccaggtaagtcctcctttccctcttttccctctaatttgtaccaaaccctattgttatctgccatgcacaaagtcarttaactcctagtcagagcagggacttccctcacagagcattttgataaagttgactatgagagggttgggggttggggttgctctgttttcagaatcccaattgctatacttttctcagtgtcatttctatttaaggttgactgggctaagtccttggagaaaaatggaaaatttagcttttaaggtttctatcaccyaggacttgtacatgccactgcctctgccttaaatgaaatatttttctcttctaccttacagtattatggcatgacggagatgaattactacacggtcctgtttggggtgtcacgagcattgggtgtactggcacagctcatctggagccgagccttaggcttccctctagaaaggcccaagtccatgagcacagagggtctgatgaagtttgtggactctaagtcagggtaaaactggagactgggtgaaagtgactaccagaaagtgaggaagcctaaataaaaagtatacttttgtttcagggggcctttaaagacttaagattaaattatatctgaggcactgataatatgtttgaggttaaaatataaattaagactttaaaagatgaaaaatggtcccttcttccctaatcagctcccttcccctgcctggtatgagttgcccatcatasgcatggtcctggaggatgaccaggactaatgcatgtggtatgagtaggtttggccccctcactatctctagagtgagaatctggctcctgtttccatgggtcaaagccggttgcagagaatctgtagtcactttggagctttagcttctctgccaagccctcaataagccagcaaaccaggactctgccccttctgtttccataggaatcatgttggatagtcagctgtaccaagccccttggccctctcccatgcacacaaacacctcctagcaagacctgttggttagctggacatgctttggcaatttttttatactaccaagtgaccataaaggcatggcatttgttgtgactggcacccaatgtttgattttttttttaaaactatccaattaaaattaaggtctgggagtgttctgtttcccattactttaatactcacctcctcccagactttctacacctgttgcacctcaggcagaggatgttctggacctccccctcttggtccctactagagacctctcaacagatctgtgggcccagtcattgggttttatcagtgcttaatgtgaactaagttttttacttccacagaatacaagccactaccttctgacctccccaccccccaccaacccccatcttttaatatgctgtggggcatagaactccggaatgaccagcatgatattttcagagtcttgtccccggggtattagcacctctttttgaacagggaattgattcaagattggacatggtctcctctgattatcaggtactggggctgagggcattaaaaatagtaagcctccctcctcgtcccctgcctcaagaaattgcctccttatttatcaacatctttttcctccctttccctgagagctcacagtacaatgtttcagaagccccatttgcacaggttttcagcaactcagaatgctctacttctttttctttgagaaaggattaagatacactcctgctgtgcccccatctttcctccaaactcctgcctgtgtttgtgtggatacccagtcccagaaccacactgttgagttggacacactgtaaacccctgggtaactgtcaagtcatgatggagacttcaggttgttctgtataaaatgcaaaataaatgtttttattaacaatgcttgagcctattattaaataaggcctggaagaacctttattatgaggtaaggaatctggctagcaagatcctgaacttagtgggttataagtaatctgtatccatttatctttaggcaggtttggctttcttttaccttaaccagaggaaagcctccctgagaaatttccagaggagatttctgtccttcctcaaggttaggaagtccttgatgtttagcccctaaccttgctaattttgttgtaaggtaacatactcaagggctatagctgagattctcaattgcttatgtgactaatccaagaactggtctagcccactgagagaaaggaacaaactaccaaggacgaatgggctagtactgctacctcaggaccagagccactagagggctctggtacttcttggagtgcctgctctttatagcttccctgaaggaggtcccaaaaataacaagaggtggtcctgagggcatcacatatatgggaggtccaagaccagatgattctgtcctgagatccctgctgcaactgaccttctgaaaaagtctataaatagacaagggggtgggtactaggtcctggcttgtagaatrtgctactatagttagcagggacactgtgtccaagaggccttcttataccttcactcccccaggaaaagaagccataacttcgttctactctactatatctacattattgccccaagaaacaatataataaagccaaattcacactgtcacaatttattgaaattttataaaaactcaggccaagtggaaraataaggtacaactcaagagtacaaagacaactccgtttccgttcagtacttttctcctcagcactggtggtaagaaagccccttgctctctagtagccaggcagcatggacttacagtcttaaaatgaggctttatgtatttcaggctggaggcaggttgccttttctcctgaggaatctcaggcagggtaaaagttacttaccactcagtacctctgtgccagaagaaaagctcaatttattcaatccttagaaaagttactatcgtcccctggtcagacactaaggtgtcttgataaggtccagagacaaccacatagtccttattctaattcgtagtgaaaaggctgcaggcatatggtgctcctacgatgggcctgaccctttcctaagcacatctcatttccacatcctttgccttctctttcccccaacatttccagccagcatagaacccaatttctgggaaattgagaggagaaacagtattatgaacacagactcctttcaaattggaacaggagccaaaccaaataaataagagaattgtgtagggaagtggggtagaagggaggtcagggagcaatcccttgcctcaagtctggtgcacctcatggaacatcagttcacgggggatggctgtttctgraccaaayttggtggctgcccgacgctcaaaggcagcaacattctgtttgacaacctcatcaaaaaacatggtggccagctgggagtgcagcagagaacgaaattcaaaggaaatctgggaatgggtaagagacagtcagaaacttccagaccatgttggatagtccctggccaaatgcaaggaaactgttcctcagtgccttttctccccctccccatccagttcgtggatccccgtaagagccctaacttgggactgagcacggagtacgagtctgacacaagctcagactaactgacttgggaaatgctagctatacttaaagaataaccctgtcaggtcggtgcggtggctcacgcctgtaatcccagcactttgggaggccaaggcggacggatcacctgaggccaggagtttgagagcagcctagccaaaatggtgaaaccccgtctctactaaaaataaaaaatcagtcgggcttggtagcaggctcctgtaatcccagctacttgggaggctgaggcaggaaaatcgcttgaacccagaaggtggaggttgcagtgagccaagatcgtgccattgcactccagcctgggtgacggagcaagactccatctcaaataaattaataaccctgtcacagtaccccagcccttcctcatacccagtcctcgtcctctgctacacaacctcctgactcaccgaaaagtccacagtgcaggttcgaggataggcaggaataccagggctgaatcgccaaatagtctctaagtggttgaagagcttgccatcagtacaaacagcctagaatagggtaatcaggtagttaaataacattactaagtataggatacaatataaaggaattgaaagccattttccttcttttctgatatgagggaaatacttgacacatggacataaagtacttacaaggaaggccaaaatagcactttcatatgaaactgctaaaaacaaaaaatcttgtcaatccctcccatacaggcctcaccttgaccatgtgaggtttgaccatggaaactgcagaggtgtaacgttccatgacaggtggaaagccaacctccagctgggctttcaaatgacccttacggctggataccaccagagacttcttacaccagggcacaaactcacgatactcctggacgttggacaccacctcatacatctcctgcattgagtacctaggagaagaagaatcacaggccaaggagctgccagctgggtcaggttcctccttgctataggcccctaattcatacctttgcccactaaccacgcaccttcaggaactacagatcccaaataagcctggatgaataacttcccaaaagcaaacgtgtaaatccttatgatactgttaccttatattttgcagtttacagaatgcttttgcattcattgtttattttgattttaagagggaccatctagggagaacagaggctgtcagttttactggtgatcacacaaggatcagatcccagctcttaacaattttttaacaatgtggccttaggtaaattacctgtgtctccattttctcacctgatttataggtttgttgtgagaattaaatgagaaatatctatgtaaaacatctaagtcaagctgctagcatgtagcaagtgctcgataatttagctattatgctcaaaatatactaaaaaggttacgctgctaatttacacatactaggtacccataaaaattatttttaaatggtcaccagaaaaatacaccctgttttttgttttgttttttgagacagtcttgctctgtcgcccaggctggagtgcagtggggcaatctcagctcactgcaacctctgcctcccaggttccagcgattatcctgcctcagcctcccaaatagctgggattaaaggcgcccgccaccgtgccaggctgattcttgtgtgtgtgtttttttttagtggagacagggtttcaccatgttggccaggctggtctcgaactcctgacctaaaacgatcggcccgcctcagcctcccaaagtcctgggattacaggcgtgagccaccgcacccagctacgccctgttgtcttaaagtatagtccaaccctagtctcatttcacttaagcacatgcacagcaaccaagaagggagaaattaaggtcggaagagtggcaggggaggactgaggatcagtattgtagctggggagggggatggctagggatgaatcttgcccaccgatgataccctgacattcttgcctggacagggttatttggagggaaaagggaggtgcaaggatgcaaggcagagaatgcttaccccatgattctacgctccgagtaagcctttcgcttgttggtgaagggagcagcaaatcccatgaaggaacggctcgaaggtaagccagcctcagccgccaagatctgggcagcccgaggcaagaggaggctgcaggaggtcagaaacctaaggccaaaggaaagaggagccaaccgtatagttcttcgtaatcctctatcatttgtaggtgaaggagaagaagagtgcatcccagacgaaggtcgtccaaacaagctttccccccagcacctgctgcagcccgctaggctctctctggcyagggagtcacgagtgcaaaaggtcgagggcagctaaggacagggctgggggcggggtgagggggatgagaaaaaggggtgtgtgggaagcgccagttgcctttgactgggcctacactactgctgaaagctaagactttaaggaagcatcactgtccccggggaccccagggcgcccgcgagggccaagaagaggttggacactcaccccgagaacttcccttctcgtacaacttgcaaaagcattatccaaagctctacgttagctcccagggcatgattgctgccagtccccgccgcgcctgcatcccagtatagcacccctccaccgcggaaccccggggttcgcagcgaccccctgccctcagccgcggtcacctccctctcacctcattggtcgcggcggtggcagagggcctgggggcggggccggttgcgcgcccgggctgagcgagagccggcagcagcgctcggctgccgcgcgcgtcccagctgggacccgccgcgagcccgcccaggccatgcgcgcgaccctgcctggccctctaagttctgacgcgggctgcgccctcctcactccaaaggcggagcggcaagaggcagcggctgggctggttcgggacctctgagcgcaggggcgacgggaggcggcagcacctctcgccttgctcccgtccaggctgccgggtaggctagaactgaagccgggaccgctgctcccgcagatctcggyacccccacgtcacgctgttgccatggctcgggcctgggagaggaaggaaggaaggaaggggacaacgccgcctgtcgggagatgtagtttcacacctgtggcgagaaagggcactggggtgtgcgtttgagaagctgcaaagatggttcggggactgaggtcgcctgtggtcacaggacccgataggtaggcacagaggcgacttcgtgggcgtgtctaccgcagatatctgtagatcctctgaacgtcgctgttagagccttaggttctctagagggacagagtgaataggataaatgtatatatgaaagggagtttattaagaattgcctcacaggatcacaaggtaaagtctcacattaggccgtctgcaagttgaggagcaaggaggccagtggtggatcagtccaaggcccaaaacctcaaaagtagggaagccggcagtgcagccttcagtctgtggccaaagccccgagagcccttggcaaaccactggtgtaagtccaagagtccaaaagctgaagaacttggagtctgatgttcgagggcaggaagcatccagcatgagagaaagacgaaggccggaagacttcagcaagtcagcttcttccacctacttttacttttatttatttatttatttatttatttatttatttatttatgagacggagtctcgctctgttgcccagactggagtgcagtggcacgatctcagctcactgcaaccttggcctcccaggttcaagcgatcctcctgcctcaccacccccgccccgcccccctccccagtacctgggattacaggcatgcgccaccatgcccagctaatttttgtatttttagtagagatggggtttcgccatgttggccaggctggtctcgaactcctgacctcaggtgatccacccgtctcggcttcccaaagtgctgggattacaggtgttagccaccatgcctagccctgcctactttttctagcgtcgctggcagcggattggatggtgcccaccattgagactgggtcacttccttccagtccactgacttaaatgttaatctcctttggcaacaccctcacagacactcaggaacaacactttgcctccttcaatccaatcaagttgacactcaatcatcacagagcctttatcatattcggccttgtttatagttagaagcactgttcatctttgtagcttccacaag

SEQ ID NO: 94641 - DNA, 125873 bp, Homo sapiens
tgttgactatagtggctttttttccctaggtggagcaggaagttcagggagacttaaacctgatgacttccctttcccagctgagataaggctctggcaaagtatttttctctaaagagtaggcctttgttatggagaagctgttggtgcattttttaactactttattatcccctcacctaaccaaagctgtgagaggattttacatctgtaagaaatcagtgaagttactataagtaaagcccacagaagtatgggggacctttccaactacaaccccaagagtttctcactcttattcttgtccacacttagcctgcagaaatttatcacaattaatatttctgttttcctactggtttatggctttagaagtggcttctgttctaactctctggatgcttctgtctctctaggtgtttgaagaagctgcactgaaacctcagttctttgataggttcaagaaaactcattgattttcagtttatccagtttttttcctgctgtaagaacaggagtgacaacttccaagtcatatgttagagccgaaactgaaagtcatatactgttttcttaatatgctatatttttgttacagttactgttctaatgtcaaaaatctgaaaagattaaatattttatgttttagttttaatgtatggattatttcctatgttagaactaacttatagcttctaagaaaatattgctagtattttgcaaggtaaacttaaaactgaagagtattgtttatcactgtcatttttattttccataataaataggtaaaaattgctctataatatgaactctggaaagcaatatgccaagaaaaaaagaataatgtattagtacactattgtatcattaaaacatagtaatttgcatatatataaaaattggatagtctgagattggaagtatctgtttaaaactttaaaacctctggttggattaccatttatttggcctgcaaactggggcttcatgaacctgtcagcgtaagagattatatgaagcatgaaatattcaaacttttatctcatataatcaaatatgaacaaggagctctgacattattatcataatagattttgcaaacacaaatttaaaaaatttagtaaaaagttaaaaaattgagttagagatatggcttagttaaatgtttcaattattgattaaggtttgtgttaggttacaaaataacgtttaaagtggcacaagaaccttttataatgtaaatcaatagtagtaatcagaacaacagcagcaagaataacaaaagaaacctcttattagagtaggtaactaggcagatatgaacaaggcagatgatgtctcctgaccccctagaatatccaccgaccatcaggtaatggtcagggagttgttatactgtcttttaaaagtagtaattagtgacagccagcaccaaagaaaggcagtctcccaatagacagaaaacacctgaagctggtgatcagcagctgcctgataagatctcaggagttgggcaagagagcttaagcatgtgcactaagaggcaaaatggaggagtttaaccagtatattaccttcctctaggaatgctcaactggtaagagacaaatgcctcaaatgagcatgaacacaacttcagtaaactcactgtgcatgtggcccctcccaagtgctggcatgtccctgcatatgcagacagcctgcctcaagacaaaaatcaagggaagaaaaacagaaaccccagaaccatgccaatgtataaaatcccatgagttaagggctgaacagtgcaataggatctctcaagtagcccgcttggcctttttccaagtatactttacttcctttcattcctgctctaaaacttttcgataaatttttactcctgctctcaaacttgcctcagcctctcactctgccttatgcccctcagccaaattctttcctctgaggaggtgagaatcaagttgccgcaggcctatagggattcttcactgctaacactcagataactccagttttaaattttagaaatctaaagatgcacaatgaaactgattcattgaagaaaaccaactttgacaagctttgcttgtcaatgttcttttacaatattagggtttgtagcattctttctattcaatgcttgcttaaagttaaggtagaatgaaaaaaaaaaaacagaaaaatggtgcttatcttcaaattcctcggaaataaatgtagacttattgtccataccatggtgtctagctgtgataaattatatactattaacagaaagccatgctggttgctggaatgatgtgagatgaaaaaatggcatttgggccttagttaagaagactctaccacaatcaaaaccttctcctttaatatctatctgatatcagataaatgcctttgagcaactccctttcttttgagatgaagcctcgctctgtcccccaggttggagtgcagtggcacaatctcagctcaatgcaacctctgcctcctgggttcaaacgattcttctgcctcagcctcctgaatagctggaactacaggtgcatacaaccatgcccgactaattttcattgtatttttagtggagactgggtttcaccatgttggccaggctgatctcaaactcctgacctcaagtgatccactcatctcggcctcccaaagtgctgggaatacaggcatgagccacctcrcctggccgagcaactcttcttagtgatttcttttaagaaaatatttgtcaaagtttataaataatgtaatttatttatggtctttttaaatatttggagaagaacattatatcaatttttgcaatgtattaaacagctaaatatatgtcagacactccagtaggcaccttacatatgttacgaataattattactatatttttagtactattcttttccaaacatgatactcgcttctgttactggagaggggtcctgatccagaccccacgagtgggttcttggatctcacacaagaaagaaatttgtgcaagtccacagagtaaagtgaaagcaagtttattaaggtaaaggaataaaataatggctactccatagacatagtagccctgagtgctgctggttggctattgttttggttatttcttgattacatgctaaacaagaggtagattattcataagtttttctggaaaggggtgagaaatggaactgagtgttcctccccattttagaccatatagggtaacttctggatgttgccatggcatttgtaaactttcatggtgctcgtgggagtatcttttagcagactaaagcattataactagcatgtaatgagcagtgagaatgaccagaggtcacttttattgccatcttgttttttttggttttgcaggttttgggttggcatctttacggcatcctgttttatcagcagagtttttgggacttgtgtcttgtgcaggcctcttaactcatcctatgactaagaatgcctaacctggtgggaatgcagcccagcaagtctcagcctcattttatgcacccctattaaaaatggagtcacacactctggttccaatgcctctgacacttctacataattatttaatttattaatggcactacacattttctcaaaataccctttatttttttctttttaaaatcatactttaagagaaggaggctagatccttcatggcattgtgaacccactctatttagaccagtactgcctacttctatatatctcattcctattgaaataaatgatttttgaaagccttatttgatagtcactacttaaaaaaacaacaacaaaaataaaaaatgcattcaataatgattaactgatacaaccaggaatgtacctttgcagtatattaactttgaggatttttctttctctttatccttgatggttgcagcttcccactacatgtcattttatttatatcatttgattctgaatcatgtttcaatgtgagtcctcactctagcttttctataatggttcttaagtacgtattctcaaagactgtttttgtgccattttgtccgttttattctgttggaactttttttggtctgattttaaaatcctcccattttatttttcttgtctcttaaatgctcttgaaattttaatttctctggaattcctacaaaattctttcatactctcttgcaatttattttacttctttgtgttatatagtctacagcctagaatttattctgcttattgattttgtgatttagttttatttccaaaagattttaaaaatgatttttcatatccaccagttctgatcatatttcttcctgcttttgtttcagaaccagttttatgaaggctatttatttgtgtttttggtgagatatttattagcattcattatctttctatattatttatttagtatctgggctcattttcagcgagattttaaaaatgctttattataaataatttaaaatatgcaaacatagataaaaatagtataattaatccctatacacaattcacctacattcaaccatcacaatttttccacatttttaaagtttattttttcttctctattatgatttttttagtttctccatttgggctagagtattttaaaacacatactagatatcatgacatatccatacataattcagtatgtatctccaaaagataaaaacattttctaccataaccactatgacattattaacatcttgtaaaattaaagacattatttgttgatattatctaatattagatagcattaaaaattttctcatttttttcagtttatctttttaaattggtttgtttcaatctggatcctaagcaggtttgagtaaaagtttgtgccattgctccttctgtgctctctctctctcactctttctccggttgtctttcacaataactcttgttaatacctaaaccaaggtaaaggtgaggctgcagagcagcagtgtccaatcttttggcttccttgggccacattggaagaagaattgtcttgggccacatataaaatacactaacattaatgatagctgatgagctaaaaaaaaaagtcacacacaaaaaatccataatattataagaaagtttacaaatgtgtgatggtctacatttaaagccatcctgggtcatgtgcgggccaagggacgtgggatagacaagcttgttgtagaatgaagatccacaaatttctgctgtagagatttctaagagttccctgattatttagtcccttaaacttgattttatattattcttggtattatgagatagcctattacattgcaatcaatgacagtgtttttctccccttcatatagctcaagctggtttacagtgggctattctcatctctttatttatattttaagtgcctgcctttaaacaatttctattggggtttaggttaaattccctcacacaacaccccccccttttatttttctaatttaggaaggactaacatctgtgacttttatgcaagaccaagtatttttcttactttctatctttattggtcaaattctacttctttactcgacattgttgtcggtttgcacatacaatgtcataatgtaatttgtattacattataacacacaattaaaataaaacagtactgaaggctcatatttaaatgcaaaacttcatggttctaccttaatttagccccagttactccccaaagattaaaccaatttcaactgtctagatttttatggtgtttaatctccatattctgaagtaatatgcttatattgctattttggacttatcaattttagagagcatatttgcctgctctaaagtacactcataggggaaacagaattccactgactaacataatgacttgtttctcaaataatttctagactaaacaatcatgacaattatgtacaccaaagttttttcttctgtaccattttcttatataataggagaacaaacaaaaaaaatcaatgacagggagaactttccacatgtctggaagtagagacgtgacttacagtgcttttgctgaaaatggtaagagagtgacattaatccatcttcactttcctgacaggtcatttttataacactatgggcatgcatatgtaagtcagttgactgataacaaaaagtttataattgtgaaccaaatgaaactgactggcttaacggtggagaacatacctgtgaccttgtttatattagccctgatatgtaataaattaggttatatagtcatagatggaggaagcattccctttaaagaagataatactaggcttctgaactattctgatgaaagattggcccgcacagggacttgtctaatgtataaagagctatatttgatgtggactaattttatgtaaaactggaaatacttactcacaaaatcaacagatattagagttgaggttagagtccagcattgatgcaatctaatcttattttatagttgaggataattgaactgagagaagttaaaaggcagatatattcaactgttctctaattttagacctaattgtccattgggcatacttctgacatgacacttcactgaattcattatttacatgtcaggcttcctgctggactgtaatctaatgaaagcaaggggcaacatctagaatcctaaacatttggacagtgcctatctactacttctgtctcaggaataccaagcccatagtcttacgttatgagtacattgttcttaatactccataatatcctaaccctaatttaaaaataaatttctaagaaaaagtcaacaatgaactcttagatgccacaggtttctctgagacaaattaggctatctaatgacattttttaaagaacaattttgttttgtactgtgtaagagggagccattagtrtagaaattgcatcaaataattctagataaatatatttaaatatttgttattacttttaagctttccttgcattaattaaattttgatagctatatggatggcctggtttaacaatgtaaaatgtattttgttaaaaatttgttttccaaagtttaactctccaaagatgtatttatattgtatgaatgcaatcaggcttacatccaaattttctttaatcaggatattggtattctaaatctctatggccttttttttttcaggctttttaaagggtcaaaaggactgtctcaaagaattaaataaaataatgctattaggaaacatataaaagtaagagagaggtgatcctggtgtttgtcctgccacaccactgacagttgtaaaacattacctactttggagctcagtttcttccttctgaagctgagtcctttaataggtgatcttcaggttaccttcaaacatttaagttctatgatttaatgctaaaataatttatgcataccaatctattagagaagagagtaaatgaagttccaaacagaatgatcactataatacctattttgataaattaagagacagctgatatgcctaaacattcaatcataaaaatgttaagagagtaatctttaatacagcaattttgcctcctgctacttagtctcacattttatatattttaatgaaagataatcactcagaattataatttcagaacatttaagttgatattttagtgagaataaacacatttttttttggcttagaaaatagaaattaagcctgggcaacaaagtgagaccctgtctctacaaaaatttaaaaaattagctgagtgtgatagtgtgcacctatagtgccagctattccagaggctgaggcaggagggtcacttgagcccaggaattcaaggctgcagtgagctatgattgtgccactccagcatgggtgacagagtatagatgtatgtccaaaatagcaatataagcatattagttctgaatayggagattaaacacaataaaagtctacacccatgctctgagaaacccttctcaaaaagaaagaagagaaagaaataaagaaaaagagaaggaaggaaggaaggaagatactaatctttatttaaaaaatatctrtggatgtggtgtttttagttgaggaaatctatttagtgaagtctgtaggctttagtttctgtacttaagacaatgcaatcaactgcattttaggttgtgttcwttagtgttctttaacttcctttattgttataaaaactaccaaaagctgagaatcttttgagaaaacaatcaataaagagactttgtctgtgtccagtattcccaccccacatactcctttrctttgccttcagtgaatgcaggaactgagaccatcattactgaaaatgtggccgtcactactgacactcagcatatctacacattctttaccttccccataccagcattacctctgttagagtctggggaatctaacataaacatcagtgcaggacttacagttaattgctttcaagaaaacaaaatacaccattgtgtcattttatggtgtgcattcaaggggtggggtatgaatggcaaaatcattgacaactgtttcactggctagagcatctggatttctcttcaaatttgcagaaagtttatmttttttttctcatccaatccatctcatcttcagcaagcttatcaaattgccaagmaatttttggaataggtgttttgttttaaaaaaattagtttactgttgctattgatccaagatgactccactttatgcttcttgaatataaaagagatataagttctacaggatcccttaattctatcatgtggagaatatgaattaaatacctactatgtttaataatttaaaaagactttgggacaatgtcaacatatttaaaggggaaaaggttttgaggttttggggtatgkactttattttgaactaattgcttttctactaacatatcatttcatttaatgctttagaaaatcttgtgagaaaggcttaatgtccctccattcacacatgaggctgagaggctaagagaaataataatccagtcatggtcacaccccttccagaaaaggaaggaaccgggatacaaacctggatatggctccaaagttcatgtttgcattaattctgtgctgctctcttcaaggagcttatgagctagtggaagaagtgaacatgcaaatatcccaactgcaatattgaccaaatgcccatctgaagagtacaaactaaaagtctgttttataaaacacaataattcctgaaagttaaatcaaagttcagtttaaaccaccaatgttttgtatacatttcataaatgctgaggttgatataagatcttatctgtcatcaaataatgtctgatttcaatttttgttatcaaaatagcctcattcttcttaattggttttctaattaggaattggtttaaatttagacataccaataaaattatatgaacatataactacaatttttcatatttgtatggwaattatttttaaaatactactccaatgtaakaaatttttactttgcatatatcttctgcatatatttatacatttaagatgattttttaaccagtattcattttttaacatgaatattccatttagtcataatcagtctacatgtaaatttatatactgcttttttgcatataacattacataatattcttagtttataaaaatttaaactcaaaagactggattatgtttctaaaagagaataataaatgtggtactgtcatataacacatttttagaatttttaagtyctttaggtagatttctttttgccctcaaatatattttaatattgaaaattaataaaagcagactacaatctcacctaccagataatctctggtgattttaaattgaagcatgaacttttactgattagagaattcaaaaacttaggaaaggtataaaattatgaaaagaaaatcttcgtcacctccttagtacttgtctgcaaagctaaccaggattaatttgctgtttattcttccaaataaaaatagacacataccactatgtgtaatatgtgtccttctatttacaccaaagagaccatgcacatatcctatcttacacatctattcttttacttaatgacactttggggactctttccatatccttagatggttctatcacattttttgaaagcttcagtctgcatagttttccattatattaaagtctcaacttacttaaacaaaacattccttctcatttatatgctatgatactagatctatattgtgcaatgagaaagctgcaatctgtatcttttctatctcatttttgtttttctatcaaatctatgtggtaagttttcagaagtttagttcttaggtaaaggagtgttgtcatttaaaatgttgatgaacattgctaattttttttgtatatatgttgtataaaatttgtctcccaaagtggacagcaatagctaactttccagagtggtcactgctaaacacaacttattatatttgacatttgacatgtattaactcatttaatcctcactctgctttagacattatatcgctacacatatttattttattttttatttttatttttttattttttatttatttttttcagatggagtctcgctgtgtcacctaggctggagtgcagtggcgcgatcttggctcactacaagctccgcctcccgggttcacgccattcacctgcctcagcctcccgagtagctgggaccacaggcgcccaccaccacgcctggctaattttttgtatttttagtagagacggggtttcaccatgttagccaggatggtctcgatctcctgacctcgtgatctgcctacctcggcctcccaaagtgctgggattacagcatgagccaccgcacccggcctttatttttattttttaaatttttatttatctattttttgtgagacagagtctcattctgttgcccagactggagtgcagtggcaggatctcagctcactgcaacctctgcccaccgggttcaagagattctkctgcctcagcctcccaagtagttcagattacagacatgtgtcaccayaccaggctaatttctttgtatttttagtagagatggggtttcaccatgttcctgcccaggctggtcttgaactcctgacctcaggtgatcctcccatctcggcatcccaaagtgctgggattacagactgagccaccatgcccagccccatattttaaagagaaggatctgaaacacagtagagtgcctaaatcacttagccaaaatcatgtggctgataaataatgaagctacactatgaacayaagcagttcagctgtatggtgttaaccaccccaacatattgcttagtgttgttgcaggaaagagtagatactttcaacttttggattttgactaatacaacaaatgaaaacaataagtcaatttgagttagatcttttgtaataggtgaagtaatatttatgttttgttcattacacaaattgctttttctgtgaactactttttcatacttttgcatagttttatattgaattattcaagtttctcagtaatttttacaaaatcaatagaaaaaatgaagtgaaactttgtgatatgtgatacactttccagagagaacttttatatctttatacatttcaatttattgatttttagcttctggatttgatcttctttttgacatttttattttattcaaattatttcagtatatcatttgcaacatctaagaatttttttaatttaaaaatgattgttattgtgtattatcagaatccagatgataaagtctttcatcataaaaaggttgtttttaaaatagtccttcaaaactgataagatgtttataaactgacagtatttgagaagaagaagataggtagttgggaaaggtaatatatacatgggaaaatggcacaggtatctgccccaggctaactggatgaataggaagaaactggtaactgaatgagtacagctactccgtgtgcagtgtcactgaacatacagacctgaggcctttctcttcccactttacttgatctcatttgtctaaaagcacagtaacctttgttactggcaactcaaaggttacagtaacctttgagactggaaaatgtacagtaatttatgcagaaattagtccatgggggtaagaaaatcctacattctttgcttgtgacctgaaagacatctagatctgttgatgaaaaaccagcagttttaactcatcaccttcttcctaaataaatatcaaaaaatagaggatataattcaacataaaatgaaaattcttctgtgaaaatggcaatagcctgataaggagaatttacttttatatctatattggtttataggtaaagaggcaacattagtaaaaacatttggaattttttcccactctgaatgtgatttcaatatccatgattggttcctagcaagctgccttccatctcatatctgaaaaaaaaaaaatttggagccgctatttgtttaattaatttgtatgagcccagctgttagaacatcgagtatgaatttagataagggaataaaattggcctcatctgtccagtcctattgtgttgtgttaccaattatatttaatggaaaaaatccaatggagaaaatgtttggcagtaataaagcagctgacaacaggaaaaaaagcatagttagagtttaagaacatcttggttttctagcccttattcattaattctatcttgtttcttttttgttgttgttctctttctctgtctcttgattgttattaattttcctttctttccaccccttataccaaatatcaatcaaaaactttgcttttatgtttaagtgatgaaggcaatgactaattattgtaagaattacactttttccattttcaactttgtctgggaatagacccaggtttgagttagtcctaaactttactggacagctcctgatacaaaacattcatgcccaactctctaaaagggaaaaatggtacttaataaaagtttaagcacataacatcatcagaaatagaggagattctgttatatccatgaacaaatgtatttattggggaaaaaggcagatgtacataaatctaagctactctccaatcctgtgtgaattgaggggccttactgaggtgttgacactggtcctgaggagttcctaatctgagtgcagagccagtggcaaatgtgtttttagtcaaatataattactaaagaatacaaacataacgtttgccatccaagacctctgcaacttgaaaccccagattaacttgcactgaaggccttttgagtgaagatcagtctggaaagatttttcaggaaagatggtttagctaaccagatagaggaatctgactccagatctagtgggcagcccctcttattcacaggcattagccacagcaattacatgttttcctcattgatatgacagaggtgagccaagacatagaggagggtattatccctatcttcactataatatcagtgttgtgtttaatattcggagacaaaggattagcttcgttttcagggagagatttatagaataatgagctaaatctgtgtttaataaggtttttgttcttttgtgttcactgtaatgtggaagtaatttcagtctttctacacagaggtcccgactgactcccatcacagtatcgkcagagctccagctacacagtggaatacatcatctctggttgcacatggctggcagcctctgaagattgggtttaaactgatggggcaggtctttctctttcagtaatgcctgatacaagtggcctttattatattaatagcttaccaatctccattacattgaactctttccagaaattctccaagttttgtaccctacttcatgacactaatacattatgcacagaaaaaatgtccatattataacaattagtatgtttatatatgcacatgcaaaagttaaactaggaacaagtacatattgaaatatatgtatgtgtgtgtatatacagacacatgtatatgtgtctgtatatacacgcgtgtatgtgtgtgtgtatatgtatgcacacacatagtggcaataaggtgctggacaaagatgaagatcttggtgcatcctaatgttgaattttgtagaatttttaaatatgggaattactaaaaggatcatctttaataatttagaagtttcataaaattgtattgcagattctgcactctgccttgcatgtcaggtgatccgagatcttgcccaagtcaaatataggtcctatgacattgggcaagtcacttaaactctctaagccttcctttctgctgggtaaagtcaagtcaagctagctaatctccaaactgcctaccaggtccaaagggctgtggtcacaaccaaagggatccattaatgaaattcccttacagagaggttcccaagttagtgacagaactgtaacgctattgaacgttctatttaacactgcagaacccaagagtgaaactgaatcaaataaaaattcacacttacttgagagctcctaatctgtcaacatttatctggtttcacagatgctttctttttctctgatacaaaactatttatattcaagacacatggcataaaaactgtttctaaatacatctttataaagcctcaatagcttatttgtttcacttacctttttctgcataaaaaagtactccaaatctctgctcccaagtctgagggtcagaaatgtggagagtagctcccctctgcctcatagagtcaggtggggtcagttggggtgactcatacacctgtggattggctaaaatggtttgcttggggcctgttatggactgaatgtttgtgtctcttcaaaatttgtatgttgaaatcatattcccattgtgatggaatttggaggcagggcccttgggagtatgaactgagaagtgggccctcactagacactgaaactgtcagcagtttgatcttggacttttcagtctccagaattgtgagaaattaatgtttgttttataatctacccagtgtaaggtctttcattatagtagcctgaactgacaaaggcagggtcatatgtgtgacctcagtttgtgctgttggctacagtctgtcactcccctgtccttggataatggctgtgatggtgggaagagccacaaagatttctctcacatatgtggcaactcaggcttgtccacgtgcccttctcaccctgtgaagatagggtgggcttcccactgcatggcagtctcagaggagttggatttcttacatggtgactgccattcaagaaggaggaaatggaagcctccagtcctctgaaagactaggctggaacgggcataatgtcacttccatcatattttattggctcagccagatttggcaagtacacaaatgatctccatctctgggtggtaggaatggtcaggaatttgtaaccatctttaacctgccacagtaaccactcctggtttggttacttccctagaggcagaagaattgtttgggttttgtcatctatgtggataccttctccattttagttactggcaagtttaaatgaccagatttttttccaaagggatattaaaccaggatgagggtacaactaatattcagaaattcaacacaggcctcacttgtaaaatgccttcaacagttcaatataggcaccagagggtacagtgctttttgcattagaagcacatactttgactctcagttggagacaatctcacttgaaaaaactgtacagcctcactgacgatggataaagaattaattctgtaaaaaaaaaaaaacagtatatgagtttgctagagctgccataaagaaggtatcacagactcggtgacttaactaacagaaatttattttctcacagctctggaggctaaccatccaagaccaagatgtcagcaggattggttcctgagggccttgaggaagaatctgttccaggactttccctttggcttgccattggccatattctctctgtgtcttctcacgtcttccctctgtatttgtttccaaatttcctcttcttataaggacagtagtcatattggaaaaaggaacaccctaataacctaattttaacttgattacctctttaaagaccttatctccaaataccatcacattctgaactattaaagattaatgcgtcaatatatgaattttgtgaggggcagggagacagaatacaaccaacccacaacacccagatacatagcgaaatcttcttcttctaggccccctgtgcctgtgtccaccacttcatcccccaattagctatatttgaaaaagtaagagggaaagaacagttggagggggaagagagagagaaagaagacagacaacttagattatgtgccctagatgttggccttacaaaacgggagcaaatcttaaccaatcattgtagcaaaaccttttgtttatgaaggaagttccttttgtttcttttcagtccactctacctgctaattaaaatcaataatatgagatgccgtgctatctttcctacctgagccacttatactgtattgtcaggtttggtttatttcattttctgagcttatttgccagttaatcatttgtttttatattacaaagtggctcatctctgcctcattacacactgaaagtaatgcctgacaagcgattgtccaacgctcaccaaaccgtgcttgtgcaggttggcaaaggatgctctcagcatagacaggctgacttacatacagccagcctacctttcctgtctcactatcagatctgttcataggtcccgacacaggggaaaaaaatcagaatgatatatagaattaaaggataatggaactggaataatgttgagcatcttaattagagactttgggcaggatataatcatrcatgtgagttgaatacgtaattagaagattagaatctttgaaaaagaaggaagcgttagtattctttagttagcaaaatgyactgttttatagaatgtaaaacaaacagcaccaaagaagacaaagttttataaaatgactttcccaaggtttactcatttcttcatataagagaatgtgcttccaatgtactgtgaagatctacagcattatttactkatgtaaaagaaaacatttttcattaattattttgcccatcttctgagtcctcctgtatttcatattgtaccaaggtctatcaataaattgataagctcagtgcaaacagaataaatgtgcttttaagacattgtatgtgctgcatcatgaagctattgctctaacatcaatgggacattcaatttgattttttttctttagtgaaaatggatattcactactgacattcacattttatgccttaagtcattgatgataaacaatacatagctgctaaaaagttgcctgagatgaagggtagagtatgaaactagctggttaaagtgaaaattgagcccatgactcataacctcagctttgtagaactgccttaaaattggactttggtctaaggtgcttgaatatagttctggttttaattttctaagtggcattactctctaatccaagaaataatttacaatcaatacaacttttagaatccaaaaaatcttaagtataaggcaattacaggtgaattagaaaacaaaatttactggtagaaaatagttactgtaaattttaattttattatttgataaacaacatggctaataagcccaagtgttaaaaagccagtgagagataaatatatttttgacaagcagcttttcaatacgagactaagaactgaaactcactatgagaatgggtgggattgataaaccttgtaaataatttcagagcaggctagggacagcttgacaccctgaaaaccttgcaaaattaatctttcatgacaatatttgaagactgccatcactgtcatcccttcaacaaatattcactgagctgtgacaagcacagtgcttggggctgtgaatagcacagtggtatataacagagactatgacatcaggaagttcatggttggtgtcacttatttaacaagcatttattgagcactacctatgtgataggcaccttgctaaatataccmtggggattaaatagaacatatgacatagtccttgtgctcaagatttacctaaccactccacgtactgatttatggaaattctgaaactaggtttgttatttacccaaaaaagacactagctaactaattgatagagaaattttctgcaatattatctctcagccttcagrcaactgcatcttttttgctacctcacctctatattcttaactgctctgctctggtttttgtaagcagtgttccttgtgcggcctgtattttggaacctctgctcatgtaatggtgtttgccacacagttgaactgttgaaytaattcttctatattttgaccacacagttttcttagatacattttgtacctggttctcaatttccccttgctttgacccttcatgtgtatatcctgtaactgctgttacagatatctggtatctgaaaaagtcctttttcagaaagcctagttctggtattttactttgttgcatttctatatgagaaatatttattgtctaatctacttgaaaactgatgaaaatgtctatttaacatttatttttaattctgatgcgctaaaatccaaatgttattcagtttttaacataatgaaagaagagaaacttgcatattaaaacagagacattcatctaattagtcttactaataaaattcctaggtagtttgaaaaataaagatttgagaagatactttgctttgacactgttgaattcaaagtcacccagaaagaaaatttgacataataaaatattttgtcttttcaaattgcccactgagaaacaaaaataaaattctaagcccccagatgactgaaccaaccctctcttcgtcaagaggaacctcatggaaaccttggaagctgagttcatgaccatgatgggatgggggatcagacatgcgttatatccccactcccttgctaagtgtcattaggctttcttccctcagggctagacagaaaccagctctttcaaaagtcatgccaggtacagaacaaagacaaaacgagattcatccttccttcatccctccctgagatgtccactycctctatttccttttcttcaaatgttcactttatcttacgtaaaaagtagatttaccaaacaccaactcaagtctcgccagtatgtttttattcctttcactgctgccctcctccccactttttagataaaatatataaatactaaacctctggagaacctctttggacaaaacagccacatgtgcctgtgacttgagtttttcccgggtgcaccctcaggctggctcaataaaccttgatgatttaagatttattatgctcagttactcattttggttgtcaccaccatattttaggctgttgtttgttactggaatactccttcattcccagaaatcctgaaaattcttccaaacatataagtttaatkagcattttaatactaattatctacatagggtattatgagtatatgtttttccatatcaccctttggcttaccttattacagcagcaacagtgttttgcttattttagttgcagttagaagggtttcttctaatcagattacattttcrtttgacaaatttatgaaaagaagccttaaaaatacttgccaggagaatctgataatttatgtcaaaattacatcagctgatttttaaaaatttttatttccatgcttttgggaatatagttggtttttggttacatggataagttctttagtggtgatttctgagattttagtgcacccrtcacctgaacagtgtacaccatacccaatatgtagtttttttatccctcatacccccaacattccccctgagtccccaaagtcctttacattaattattcttatgcctttgcattctcatagttgagttcccacttataagtgagaacatttatttggttttccattcctgagttactttgagtagctacccagtagtaggattgctggattaaatggtagttctactttcagtttttaaaggaatctcgatactgtttttcacagcggttatactaatgtgccctgctcttctgtatttacagtaagagttgttaaagcaaactaaatacggcctgagaaggactccatacttctatatttgagtccttgtggatgaactgcaatctaacataataagtagataatattgaaaatttaatttaggagtatgtgcctgtaacagtggctgagtcttggccaatctcaacagccatacttcaaccagtcatgcactgctgaatgctcaaactgtgttcaaataaggcaaatgccaagctgtagccaatccagctgtttttgtacttcattccaatttctgtacttcactttgcttttcttgtctataaatttgttctgtccacaaggtacccctggagtccctctgaatctgctgtgattctggaggctgcctgatttgtgaattgttttttttttattattatactttaagttttagggtacatgtacacaacgtgcaggttagttacatatgtatacgtgtgccatgttggtgtgctgcacccattaactcatcatttaacattaggtatatctcctaatgctatccctcccccctccccccaccccacaacaggccctggtgtgtgatgttctccttcctgtgtccatgtgttctcattgttcaattcccacctatgagtgagaacatgcagtgtttggttttttgtccttgtaatagtttgctgagaatgatggtttccagcttcatccatgtccctgcaaaggacatgaactcatcctttttaatggctgcatagtattccacagtgtatatgtgccacattttcttaatccagtctatcattgatggacatttgggttagttccaagtccttgctattgtgaatagtgccgcaataaacatacatgtgcatgtgtctttatagcagcatgttttataatcctttgggtatatacccagtaatgggatggctgggtcaaatggtatttctagttctagatccctgaggaatcgccacactgtcttccacaatggttgaactggtttacagtcccaccaacagtgtagaaatgttcctatttctccacatcctctccagcacctgttgtttcctgacttttgaaggatcgccattctaactggtgtgagatgatatctcattctggttttgatttgcatttctctgatggccagtgatgatgagcattttttcatgtgtcttttggctgcataaatgtcttcttttgagaagtgtctgttcatatactttgcccactttttgatggggttgtttgttgttttcttgtaaattttttggagttcatcatagattctggatattagccctttatcagatgagtagattgcaaaaattttctcycattttgtaggttgcctgttcactctgatggtagtttcttttgctgtgcagaagctctttagtttaattagatcccatttgtcaatttgggcttttgttgccattgctttttgtgttttagtcatgaagtccttgcctatgcctatgtcctgaatggtattgcctatgttttcatctagggtttttatggttttaggtctaacacgtaagtstttaatccatcttgaattaatttttgtataaggtgtaaggaagggatccagtttcagctttctacatatggctagccagttttcccagcaccatttatcaaatagggaatcctttccccatttcttgtttttgtcaggtttgtcaaagatcaaatagttgtagatatgcagcattatttctgagggctctgttctgttccattggtctatatttgttcaattcaactcccttaaatttaattcagctgaagtttttcttttaacagagttaaaaaatcaaaatcaagtaaactgttagagttgtgtttctgattaccttaaagggcttggttgagagattttaacaaaattgtgcagagatatctcgtctacttggtcactcacagagcctggatttatcaaattttgtttgtttaagatttgtatttgttaaacaaaataaattccctgggttcagttttaaagattaataaaaccagttgaaaaaagagaaacaattagctaggaaatgattcctttgacatatgtggtattgaattgtcaatataatggcttttccaccatgtcctccctgactttaccttttcctaattaatcaatccatttttttaaatgtacagatataaggaattttaattttgggtaatgacagcaaagaagtatatttgtctgctaggagtgcaattttgatgtctgtttcagtcttttcatctggattcaagcccacaccttagcattgtggaataattacctgagataatccatagaaagcagtaggtgcagcagtgatcacagtaaagcagcactctttaaaatattttattacataaaacttgtacaggaaagggaagtgaaataatccccttcccaccgtgcctggccaaaaaaaatcaaaacaaaacaaaamaaaaaaaaacaacaataataagggcttaaaactatttgttaattgaacaaatgttagctattattagatattctttggtagaaaaacataattctctattttaaattttaaatagtggtaataggcaccacatgtgcattgcttattgtgtttcaagaactcggttatagacatatatcatcacctcagttaacattcgatgagtgctccagattgtttccccactctacacaacaacatcttggaagaaccagcctgtcagaataaattcatctttaacagtacctgatgtgattcaatagtatatacatatatacacacactaatatatgttcatataatatgtacacaaatatatgcatatgtagatatatgtgtacatattatatatgtgtatatgttctatatgtatataatatatacaaatatgttcatttgtgtacatatatacatatattattgaatatatacagacatttttttatatacaaatattataaaatatatatacaatattcaattgttccagaatatgtgacyatctttaggtctaagaaaaataaaatgttctaaaatttgaattataaaacatgcctctgaatgccatagaagaatagcaaatgtatatattacaaaaatttcaaatgaagaataaataatgcaattgtagatattcctcctggtgataactgttagctcatgatgacttgacatgaaaatcttcctactggaatgtgagtcagagatcttgggaatagtggtttctgaagtctaggcctgttcaacaaagacaactttgccctaagagagacttgtccttttctctcgattcctgggagataacttctaagcccttggtatgtcctacctaataagagtgtctgtttacctgggagcattgggacatgccagatagtctatgctaacaatgtgatttatgataggggaccttgaatcatgtgatatcaacttgacctgggggaagctggagactaagatcagacatgcgggtggtcaactatatttggataactgagtcccaccatagtgtctaaacgccaaggcttgagtaagcatctctggctggcaatactctgtgtttatagtcacacataatttctagataaacttgtgctctctactcaactccactaggagaagacaatgggaaactccttgtcagagactctcctgtatcctcttctgtatgcctcttctttggctaatacattgaatttgtattcttttatcatagtaaaccatgtctgtaaggaagactgctttaagtgagttatgtgagttcttgtagtgaactgtcagacccaagatggttgggcagacttctgaatcttcagttggtgctaacagtgagggcaggtgagggaagtcttggggatgcccagacttctagttggtatcaaaagtaactggtttggggaacctccaagcttgtagttggtatcagaagtgatggaggtcttgaggactcctgaactttgtaggaccccagcaaagtaaatacaaatattataacaaatttcaatgtgtaaaaacttcttaggttggtggtatagtataattgaaaaaccatggactgtgaacccaaagtggggctcaaattctggatcggtcacatagtagctgtaaatagaatattgtcattacatggcagtggcttttgaattttgaaggccaaagtgcaaattcatactccatcactacaagttattttatctctttctattatctcatttgtaaaatgtatactattaccttaaaatacattttgataattatacaagccaataattgcaaaattccttatatataaggagcacgatgaaatgataaatttagtgactatactattcagcaattgtgtatcattttgttatttctaagcagaacagtgcacaagaagatatcttgaatcacccaagaggtgccagagctcccatgtgctttcagagttagcaggggactatctgttcatgcaactaatacttagtgtgtttactctaccagctattgttttaggttccacagtaaaaaagagataaatatatgtgccttctaatgggaaaagagagaaaaacatcagatagaaagatagatagatacgtataaaaaatatgtggcatattaatgataagtgctaataacacaaatgaagcaggtaggggtgatagggagtatggaggtaaggtaacaatgttaactagaggcaccaaggaaaggctacactggaaaactgacattttgttaaacactgaaagggggagaagaaaaattttctacaattttcttttagaaaaaaaaagagaaaattcaaagaatcttggatgagaatgagcctggcatgtataaagaagagctgtaatgtaatgagtttatatacctcacagttccaactccccatttggaaagttaatttcaagaaaatatcactaaaacgtctttgaagtataaggaaaacatgcttttggagaactcagagccttgcatgcccactattcacttattaaatcaatttcatgtgtagattaacttgtctaaagcataaggatgtttatatataattatatatgcccaaggtatttgaaaagagttttttaatgacaagtaagattctgggctgttctgttgaaaaaagtaatcatgctaagttttactaggcatattgaattgaaaacattttcgggtttttatcctgtgttggaaattcacacaattagtatgtttatggcctttgttttacaaacaccttttccctctctctacctgaatgcattatttttcttttatttttatctgctgcttcattccaaatttattttctggaagaaataatgtgctatttaatttttcatcacaaaagaaaaatgtatttccaattttttaaagttaaaaattgtgtatggaatagtcccttctagtaggtgatgattatctatatgcccagtagccaattacaatttttttttcaaaatcatatattggtttttaattgaaacaagaacacatttatgaaaaatggcttttttaaaagagaattgacaatgcatagtgtacaggtgcatagcagtaaattgaaccctatgtatattatttaaagtcttcaatcagctgtcccagacttggtaaggaattgctattcacttgagtatattatgctgtcagggcctccttttgcattaacacaccaatgagtcagttgcatcaaattcatccaaagtgcacaagaaattataatccccatgacatttaggtaatttagtgtgttaaaagaagaactcaagcctttataagaaagaygattattttgtattgtgttggtaagagatcatagattgttcttctatgccaaatttattttttatattgttgctttcttgaagaataattccaagcatatttttgtagtaaaygaggagcaagccaattaagcctcccatgcttgcaactcaaacagcaatctggattgctataatggagagagactcaatataaattaaaagcagagagggtattatggagaaagggtcaggccttttgaattgcagagaataacaagtatgcttatgggaaaattgttcattgcaaatccttccttaaaataattttaaagtaagatttatacagttttatttccacttttaaactggctagctttacttcctttatatgttcgattttagtacatgaagagatgtaaatttaataattaactctcatcactttctagcttttaaccaaaactaataatatatatcttgtttctacaagagagagaaaatatgttgttcaaaactaaagataaatcatttaattgattctccatatttttctttctgttcctactttgccagaagttacatgagacatgttattattttgttctgattgtaaagagcatgttttgatataacctaatagttttactcagcattattgcagtaagacttatacaatacattgtccattttatccttttcattaaagtaggtacatgcactgtgtagcttattactttcaacatttaggggatgcaggatacttgctttctaataaaacaaaattatagttttatagtgacataaaacagaatttgaagaattctaaaatgatagaatatttttaaattttatgtttatgttacccaaagcatgtaaataccatagttttcactcaagggtggcttgatttgttttgacaccaatacctcaggtctacttattttcgtttaaatactgaagatagatttagttaaataactatggtattaaacaaaataaacaggtaagtttttctagttgtggttggaattgggactcaagtgtcttgaaatttgacattatcggcccggtgtggtggctcacacctgtaatcctaacactttgggaggccaagttgggcggattgcctgagctcaggagtttgagaccagcctgggcaacatggtgaaaccctgtctctaccaaaatacaaaaaaaaaaaaaaaaatgccaggcgtggtggcatgcacctgtacatatcccagctactcggaaagctgaggcagcagaattgcttgaacctgggaggcggaggttgcagtgagccaagatggtgccactgcattccagcctggcaacagagcgagactccatcccaaaaaacaaacaaaaaaacaaaaacgaatttgaccttaccaaatttattatattgttgctcagtactttactagaaatagattgtcatcaggctgttttgaagaaagaacactgtttgcaaaaacaatgagattgtctttgataagtgagtggaaaccaaagatcctaattattattgtgatacatgataaaactgtttctctgtgaaccttggagaccatctgtacaaagattccattttccagatagcaaaaaaataaggaattctcaatttattgaggaaaaaatttggtcatggccatggatttacttttcacatatatggctcaatgtggctccatcctcacttttaagcaacatctgctacaatgctttttttctcaatactcttctctctattctgcacccacatgctccttctttgttccaatgcataccaaaactatatatatgccgcttatttggcttggggtagtcttccctacttttctttcccaaacaaaactccctttcggtcaccttctctgagatcacttaacacttggtagatgcctataaatatttaataattcttattcaggctttgttgaaagtatctaccttttcttcattttcattcttctccctatcttgttcctcttcatttatggtcatccagcagaattttagatagctaatatgttcaatagtgctaatataagtaaactaaaaatgactagtctctttaataataaatcaatgtgcttaactataccactctggaattctgaagcttctttcaagtcttttactcgtatagaatctgctctgattattagttatatatgatatgcaaatcatgactttgatcaaatgcaaaattatttgaactcacacagaaattccagattaaatcaagaaaattgctctgcatatgatccaagggctccttttttgttttaacatgaaaatatatatagaggcacagagaagctatgggctaaccaaccctcaagtgccttaataactaggtccatggatgatatactgggttgaatgttgccrctgcaaaatttcatgtggatgtgaaacctgtgaatgtgacttatttgaaataggttctttgcatatataatcaaataagaataaggtcatactggatttgtgtgatctttaaatcctttatgattagtgtccttataatagaaagagagacatttggaaacagggagatagacccacagcagatctgtccatgggaagatagatgcatggattggagtgatacatctacaagctaggtaatgccaaatgttgctagcagtcatcagaagctataagatgcaagacgggattctaccytggagcctttagagggagcgtggctttgctgacaccttgatttcagacttccagtcttcagaaccatgaaacagtagatttctggggttgtttcttgagacgggttcttgctctgttgcccaggctggaataaagtaataggatcatggctcactgcaacctcaatctcccaggctcaaatgatcctctcacctcaatctcctgagtagttgcaactacaggtacacaccatcacatctggctaatttctgtctctctactatatatatatatatatatatatatatatatatatatatatatatatagtagtctctctactatatatatatatagtagtctctctactatatatatatagtagtctctctactatatatatatagtagtctctctactatatatatatagtagtctctctactatatatatatagtagtctctctactatatatatatagtagtctctctactacatatatatatgtagcagtctctctactatatatatatatagcagtctctctactatatatatatatagcagtctctctactatatatatatatagcagtctctctactatatatatatagcagtctctctactatatatatagtagtctctctactatatatatatgtatatagtagtctctctacatatatatgtatatagtagtctctctactatatatatatagtactctctctactatatatatagaatactctctctactatatatatagtactctactatatatatagtactctctctactatatatatatagtagtctatatatagtagtctctctactatatatatatagtagtctctctactatatatatatagtagtctctctactatatatatatagtagtctctctactatatatatatagtagtctctctactatatatatatatagtagtctctctactatatatatatagtagtctctctactatatatatatatagtagtctctactatatatatatatatagtagtctctactatatatatactatactatatatattaagattatcagatggttggaactatctaacatggatactgaatgatagtttgagggactccttttaagtagggtttggacttcagtgtattatttttatgatgctttttttggtttctcagaagtgctccagtaagttttggttgctagagagtaacttttataaaaatattatactggtatattatagattaatttcaaggtttttactttagggacataacatcattttgaaagagcttgcctgtggctctcagaacactggggcacagcaataaacttttaccaagaaattatgtcttctggcagataaaccaaaacttggaacctctgagatattatcattttcagtctctgaccttgcttgatacatttaatggcttggtgttagagtttctcaatctgaactttagatcaaagtaataatgatcttttccatctaagttgagacatatttgtagagtacatgcaacttgccaacaggaaatcactacatacacaaccatttattgttagttttctggccgattcagatctcaaaggaattgaagtcattgccatttgaaggttgtccagttcatttcttagacagatgactgacccaatacaatagtcacacagtccctgaacaattacactcaaactctgccttggctatcactgaagaaaaacatgattgttcaatcaatgtggctatacaattgacctccctttcttccctaagcagttaggaactgtgagaacatgatgaagaaaagttagccctgttcttttaaatatatttttttgtattttgaggtgagaggattaaaaattgcttaggtttattcttaagtgttcataagaaatattgccatttagttcaaaatttactgagtatctcatgataataaagtgagaatctgctgagtgttaatgagtggtactaagtgtttataatagtgtggatttcaaaataattgtttatgtttggtgaaatgaaaaaagctacatagagaagatgacattcaactaggtcttgaaaacagaatttcaacagtaaagataaggaggaaagaaacccttcctcatgagaaaacaaggtgaatcaaagcattcaaatggaaatataataggtacatttgagaaaaactgagtagtttgatttcrctggagcacataagcggaaaaagaaaccagatataagataaagagagtgaccacagtgagatgcctttattattataatttgaatgttatgtcataaatggggagcctggacttgagataatctgattttcccaaattaaaaaaaaagtaatctttcaatggtgtctgcatagagacatcatgacctaatatccccccaaaattaatcataaaattaaacaaaatagggtcagtttaaataaaggactagggtttaatttactcacagttccacaggctgtacaggcaacatggctgaggaggtcccaggaaacttacagtcatgacagaaggtgaaggagaagccagtgtgacaatgaactaatacagaaagttggtaccagagaaatgggacattactataaagatacctgaaaatatgaaagcaacttgggaacagggttggaacaatttggaaggctcagaaaaagaaaagacgatgaggaaaagtttgaaacttcctagacacttgttgaatggttgtaaccaaaatgctgatagtgatatgggcaaggaagtccagactgaggtggtctcagatggagatgaggaatgtactgggagctggagtaaaggtcactctgtctatgctttagcaaagagactggcagcagcattttgcccctgcccaagagatctgtgaaactttgaacttcagaatgataatttcaggtatctggcagaagaaatttctaagcagcaaaacatttaagatttgacctggctgcttctacaaacctacactcatctgcataaacaaagaaatgacctaaaactggaacttatatttaaaaggaaagcagagcataaaagtttagaaaatttccagcctgaccatgtggtagaaaataaaaacccatttttctgtggaggaattcaagccagctacagaaatgtacataagtaaagagaagctgcatgttaataaccaagacgatgggaaagtgcctccaaggcattgcagagacctttgcagcaggccctcccatcttaggcctggaagcccaggaggaaaaactggttttcatgggccaggcccagggccctgctgctctgtacagtctcaggacatggtatcctgcatcccagccactccaggtttaactgtgactaaaagggcctcaaatatgtctgagtccactggtccagagagtgcaagccacaagcctcggcagcctccacatagtgttaagcctgcaggtgggcagagggccagagttgaggcttgggagcctctgcctagatttcagaggatgtgtggaaatacctggatgtctagacagaaaactgctacagaggtggagccttcatggagaacctctgctaggaaagtgtggaaaagaaatattggattggagccccacacagagttccccactggggcactacccagtggaactgtgagaagacggccaccatcttccagatcttggtatggtggatccactgacagcttgcagcatgcaccaggaaaagccacaggtactcaatgccagcccaggaaagcagccaagggggctgtgccctgcaaagccacaggggcagagccttgagagactacctcttgcattagcatgtcctagatgtgagacatggagtcaaaggagattattttggagctttaagacttaatgactgccctgctgggttttggacttggcatggggcctgtaacccctttgttttggccaatttttctcttttgaaatgggagcatttaccgaatgtctgtaccaccattgtatcttggaagtaactaacttgatttcgatattataggttcataggcagaagggattggccttgtctcagatgagattttggacttggaatttgagttaatgctagaatgagttaacactttgggatactgttggaaagatatgactgtgttttgaaatataagaatgacatgagatttgggagggcctggggtggaatgatatggtttggctctgtgtgcccacacaaatctcatgctgaattgtaatcctcagtgtcggaggaggagtctggtgggaggtgattggctgatggggacggacttctcccttgctgttctcatgatagcgagtgagttctaatgagatctggctgtttaaaaatgtgcaacacttccccattttctctattcctcctgctcccaccatgtaagatgtgctggcttcccctttaccttcctccatggttataagtttcctgaggcttccccagtcatgactccttgtacagcctacataactgtgagtctattaaacctctgttctttataaatgacccagcctgaggtagttctttatggcattgtgagaatggactaatacaaattttcttcaataaaaacctttgagtggaattacagggtaatatgataactttattattaacattttgaggagctactgaactactttccaaagtgactgcactatttgacaattttgccagtggtatatgatggttccaatttctccacatcctctccaacacttgtcttttttattttagccatttgagtgagtgtggggttataccttactggggttttcatttttagtgtttccataatgacgagtgatgctggttgaacatttttaatacgtttgttagccatccatatatcttctctgaagacacttctactcagattttttttgcytattattacattgtgttattgtctcttttattattgggttatatattttggatacaagttccttatcaaatattcaatattacatgaaattgtattttttctttcattgatgtgttttttagtgtgatatctaagaactcaatgagaaacccaaggttatgaagattttcccccaaagtttttgtggaagagttwtatattatagttttagctcttccttttagatctttgatcaattttgattttatatatggtatgaagtaacagtccaagttaattttttgcttgtggatatccacttgacccagcacaatgtattgaaagactactctttttccattaaattgtctttttacccctgtcaaaagtcaattgatcagaaatgtaagaaaatacttattgactgtcagttctatttctttgatctctatgtctgtccttaggctagtagcacaatatctggatcattgtcatttttaagtaggttttgaaatcagaaagtgtggatcctcttactttgttctccttgaacattgttttggatttttctgggtcccctgcaattacatatgaatttcaggagcagcttggaaatttctgcaaaaaagccagctaggattttgtaaaggatcctattttattgatatatcagttttagaagtgttgctatcttaatatttagtgttacaatctataaacatgaggtgtctttccatttatttacatctttctttaattttttcttcttcaacagtgctttgtagttttctggatgcacactttgtgcttcttttgctaaatttatgtctaaatattttgttctttttgttgtgattataaattgattttttcttcttaatttcatttttgtgttgtccattattactatattgatatgcaattgcttttgtatgttaattattttttctttacttttttttttttttttgagacagagtgtcactctattgcacaggctagaatgcagggacacaagcatagctcactgcagccttgacctgctgggatcaagcaaactttctacctcagcctcttgagtagctgggaccacaggtgtgtgccaccctgcccagctcattctttgtttatcgtagagatggggatttccctgtgtagcccaggctggtctcaaattcctgggcccaggcgatcctcccacctcagtcttccaaagtgctgggattacaggtgtgagacactgcacccagctatatgttaattttgtatttcacaactttgatgaacttactcattttagcagcttttcttttgcatattccttatgattttgtatatacaagatcatgttatttgaaaatggaggtagttttacttatttctttcccatctggatgtgtttttttattttattttatttttttgaggcagagtctggctctgtcgcccaggctggagtgcagtggcgcgatctcggctcacggcaagctccgcctcccaggttcacgccattctcctgcctcagcatcctgagtagctgggattacaggcgcccaccatcacgcctggctaattttttgtatttttagtatttttaaccaggatggtctcgatctcctgacctcgtgatacccccgcctcggcctcccaaagcgctgggattacaggcatgagccaccgcatccggcccccatctggatgtgttttatttctttttcttgtctaactgccctggctataaccttcaatattgttgaatagaagtgatgagtgtatacatttttatcttattcctaatattagggtaaagttttcagtctttcaccattaattttaatgttaattgtggttgtttgaggatgtcctttatcaggtagaagaagcttcattgtattcctactgtatattttatcatgaacggatgttgggttttgtcaaatattttttctgcatctactgagaaaattatgagtttttatcttttattctatgaatatggtgtattacattgatttattttttagatattaaatcaaccttgtattcctatccttggtccattgtataatgattctttatatgtttctggattcagtttgctagcttttgttgaggatttttgtatccatatttgtaagatattttcatctgcattttttttcttgtaataccttggctagctttggtgtccaggtaacactgggctcataatataatgagctgagcaaagtatttcctcttctctcttttggaaggcttcgtgaaggataatttattctactttaaaaatgtgatggtcagatgcagtggctcacgcctgtaatcccagcactttgggaggctgaggcgggtggatcacctgaggttgggagttcgaaaccagcctgaccaacatggagaaacccccatctctactaaaaagtacaaaattagctgggcatggtggtgcatgcctgtaatcccagttactcgggaggctgaggcaggagaatcgcttgaacctgggaggcggaggttgtggtgagctgagattgcaccattgcattccagcctgggcaacaggagcaaaactccgtctcaaaaaaaaaaaaaaaaaaaaaggaaaaaatacatacaccatataatttatggtaacttttcaatttaaatggacttaaataccaaatacgtaaaatctggggtctgcaccgccccttcctagagaaatattttatgcaaaagatccatgcatcactcttgtggtgtaagttttctttaagttctttaaatttaattttaaaaatatcaacttcttaatatagattttaattatgctaggcacttgctatttagaacaacattattgaaatatgaagcaaatattgtcacttaaaaaaaatcactctcctagatcttgactaaagatacagcttacaagaagatgttaactctcactctttttgggcacactgagcaactccagcattcacctaaaaagtaacattttgtaatttatcatcagtatatgtttgtttttacttttgcatacaataaagtgaaagaagtagaacaaaaaaaggagacagacacaaaaacagagactgagatagagatattgacagacatagacattcaatattattttagttaattgtgagaggcgaccatggaaaataatcgcaaactacattcaaaggaattgcagaatatactgcagagttccttttactttcctttaatttgaggcttttggacctatgtggatgatttgaaagtcaagagaggcagagtgtgtgttagattagtttatagtgagccaacattatattgtagtcattgggagtataattattttaaaagaaatgggctgaagtttcccctcccactttctgcacattgcaggcagctgttaataaacccccaagctgattacattggtgaaaaaaacaaggaaatttatttatagttgcagttcacaatgttttgctattagacttacaattcataaaaagtcagtaattggtcaccatgacttgtagcacttgtatttccttatcctaatctgtagtccatgttcatacatgtcctaattatcctattctacagtgagtgattttaaatagcttttaccacctacttaccagaaaggaataataagatgattaatgacaacatgtataaaacattttgaatgcagaaaaggagaaatatttaaaagtaaaataatggactattatagggagcattcttatttctatgtctatagaaatacatatattttggcataatacatgaatccacactttaaaggcactttattttacaaatatgtatcctctatatgaatgaaaaaagcattattcttcgattaatttcttttgaaatataattttattttttattctataatagttgcatttatagaataacattagaataaatctaaaaagtgaagataaaattctttaaattcacatgatcattgttagtcaataaacatatttctaattgataaataaatcttatatatacatagtagtctattagtcaataattagtaaataaattgataacaatacatgtagaattttattttttttaccttgtagtattattatatcacgcatatttctttcctattttttctcttttaattatatactaaagctttctatagtttctacatttctactccatgatttaatggctacataatgttccatggctaacataaccaatttctattgttaagtacatacatagattgcctttctttattctatttacaacccatgatgagtattctgacaattgtattcattgtataacttcaggaaacattgtcagaaccaaaactaccaagtcctttgattctgacaatacattttttaagaaaataatacatactggcaatatccctttcagaaagatattaccaatttacatccgcaatagaagtgtattaatgttcccatctcctgtgacctaggcaggacttctgtatgctttttattattcctaatttatgtgagagacaagacctatctcattatttcattttattcaaattaaattatggattaagtaataatacttattttccattttatgtctctctaaaatgtttgtttaaggttgggttcaatgtcaataatttgaaaaatgaataatttccgcattttccccaaaagttgagggagaaaatgaaatatttccacaacaaaattaagtaatttttttacctattcaagaacctcttgagtttttttcccctgagttgcatttgcttgcaacagagaggaaagggggatgttactcttactcttttcaaattaattcagtttttaagctttatgatatttagttaatacatagaccacattatttattatttcctaagttatgactatttcagcaataatctaaaaggtagatgaattgcagaactggttatgagcaataatttttttcaaaatatctttctagaatggatataatataaacttccaaaaatattggtatacattgtggatatccaaaaacagcatcaggtaggtacattattggtgaccagatattttgaactggtatgtaattcatttgataacatgtaataacatgtatggatgtgtaaattttactttatgagctcaatgggaaagctatttcttccaaaatatgacccaagataatgcctgtgttgtattatttaatcaatttcaggttataagagaatctaaatgcttgtaagaatttgctctatcactgcattttgtagactctcttgtttagtattttaggccttgagtacatcacacggcaaattgctcacaatatattatacaatttgaatgatgttgggcatatcacctcatttatgcctgtttacaatatttgtttgtctttaatcaaaggccgaagtaccaggtgtctttttatagaatgtggatttttacaatgaatctccatttcatagcattcactattatgtctggcttctttcattcgacattatttcaatgacactcatccatataatatgtggcattagcttgattcttttcattactttatagcatttcattatataaatataccacaatgtatttttttctattattattcacctttagattgttctggtatcacattactattaacaataccactatgaacatttttgtacatgtttattggtgcacatatttatacatctttatttggtttagtatttcctacactcgaagttgctagtttattacttatgatatgttaagagatactgtatattatcaaaaaatcctcagaaaagactggcaaattacattcctggataattctagtcacttgcttttggtagttttaaagcttttatttttaaaatccatcctagtgaatgtggattgattacttaaaatttaacctcttgtgagtacttggttgtacattattcagtaactcatttatatcaattgatttcaaaggtgagccatttaaaaatatctgttctcaaacattcacatttacaacatatttgataatttgaaaagttttggtgtgcattagaatttgcttattcaagtaactttaaagtaactataggataatgcttcccttagtctggtatttaggcatctctacaatctggtcagtttattttccatatatgctatactgctcacagtgtctcaacagcttgtggttccaaactaaggtcatactgacagagctgaagtttttcagatcaagtgttccctcctatacctaycaaaaaaaaagtgtcctcaaccttcatctgagattcctttcctcatctagaagagctcaggatttcctctgggtagaagatggtatcacctaaaatagacagcttttaatcgtggttaaaagcctgaatttggaattatatatatgagtagaattattcagctgtactaaattcttatgtgacttatgcaggcatattcttatattctttctcttatggggtcatcgctataattaaataatataacatgggtgacacctaattatgtttttggtacatagaaagtacacggtatgtactagttatattttccaatacttcaaggttgagtttaagctatttattgtccattaattcttttctgtgcactctttaattatttatttgataaattacctccttaagatttatttgcttacttttaattttatcatatatagttttcaagagcaccttttattctttgcatgctacattttacagcattataacatccttttcttgatgccgaatgtgtaatagactctctgaggctattagttgtagattttaaataaaaatgtgatgaaaattttgcagaaaagtaattgccaattctcttttttgaatgcacaatgctccattccaggttattttagagacgagagaaaaaagggaagcagtacaagatacagacttttttttcattgcaataaaacttatagttaagaaaatgcatagattttaagcatatagtctagttagttttgaaaaagctaaacatttatataaccactactgtaaaatagaaaatatattcatcactctagaaagttctttcatcccttgcttgtcaatcatctctgcacaggggtaactactatgctgattttcatcttcatacctgaatcctgtaaacttaggtttgtttttcctccagttcatcaagtcagttgccacttttgccttgtgctttataggtttcaaacttttactgctatcacatcctaccttgttcttttttcttttaatttgtctctttaaataatcattctagtgtcattttgtgagattttagaatgaagcagaagtaacgatgtggttaatcttacattttaatgcacttttcaatataatgtcatatttttagattattatatttatttaattattgaaccattaatcttatacttaattaaatgaatgaatttaaccgcttcttgttccaacatcatgtttcttttgagtaactgaatgaatattttaggcttctttacaggcattacttttatactctaatccttttgtgtcagccacaaataattagccttgacattgttcttttacctataatcttttttttgttttttttttgagacggagtctcgctctgtcgcccaggctggagtgcggtggcgccatctcggctcactgcaagctccgcctcccgggttcacgccattctcctgcctcccgagtagctggtactacaggcgcccgccaccacgcccggctaattttttcagtagagacggggtttcactgtgttagccaggatggtctcaatctcctgacttcgtgatccgaccgcctcggcctcccaaagtgctgggattacaggcgtgagccactgcgcccagcctacctataaccttttaaaaaatgttgaatattattcaacatccgtacttattaatatttgataatatttttcctgatggatagttatttattgatatgagtaaaacgaaacccctctgcatatagctgttggctgaccttgaatatattactgcatgataaaatgggttgtaacatatcaccacatttttcctaagcatggccatattttctcaatcctcataaaccaaaccagtaaatatattaaaattttatagccatggataaatatgtccgcgaagataacctgattgtaatttcttaaatcagaagaactgtgtgactcttttatcacttttaatatacagatattttacaaatgctttaattattatgtatgtttttggattcaatttttacaaatacttagtcttgctttgtagattaaacacactttggcttatgggtattacaaatgctccaagtttagatagctatttactggcagtctaaattatattccagatccctcagaattgatccagtgattttttttttttttagtttttatttcctactttaccacattgttcacctacaagaacagagatcagagttagtaaaaaaaaagagagatggtcacctggtagaacactgctcgtatttcctgagcataccacagggaagccttacatttttatatctctgtgactctgagactgaatttcaaaatgtagtacagtagcatttttaagtatagaggaatattgctatttggtcataattaggaagctttactgaaattgcctggagaatagaggtttcctgcttcagagacaaagccttgaggtttacagatcttaattttttatttctcatgcatttcccagtatctgtctccctcccccatctgattaacatatttgatgaaatgtagtacactgagtcaggcatttgaaacgtagagacaattttaatgaagtataagaaaatcttggagggtcaaattttcacagaccacccagcactttgggaggccgagacggcagatcacgaggtcaggagatcgagaccatcctggctaacaccrtgaaaccccgtctctactaaaaatacaaaaaattagccgggtgtggtggcgggcgcctgtagtcccagctactctggaggctgaggcaggagaatggcatgaacccaggaggcggagcttgaagtgagccaagatcgcaccactgcactccagcctgggcgacagagcgagactccatctcaaaaaaaaaaaaaaaaattcacagaccaacacatgcagtgaagaattcrcagccaacttaagagcacctggagggaacaccacagaaagactccaaacagccctcagacaacaaccctatcacggatttttctcccctcccctcccctcccctccccgttctcttttccttagacacaagatctcactctgtcacccagactggagtgtagtgggcatgatcatagctcagctcagccttgaatttctaggctcaagcgatcctctcatctcagccttctgagtagctgagaccagaggcacacaccacagtgcgtgattaatttttaaattttttatagagacagtgtctaattatgctgcccaggttggtggactttcttgacctagatgcagttgttcaaaataagttaacagtgaggaatatcagagcagccaatgtagtaccatctgccaatgcttgacaccaataaactaaaaatcaaattaagcctctgaagctctgcttgatctaaactttgccttctttttttaaattattattatactttaagttctagggtacatatgcacaacgtgcaggtttgatacttaggggtttgatacataggtatacatgtgccatgttggtttgctgcacccatcaactcatcatttacattaggtatttctcctaatgctatccctccccaatcccccaaccccccaacaggccctggtgtgcgatgctcccaaccctgagtccaagtgatctcactgttcaattccgacctatgagtgagaacatgcagtgtttggttttctgtccttgtgatagtttgctgagaatgatgatttccagcttcatccatgtccctgcgaaggacatgaactcatccttttcaatggctgcatagtattccacggtgtatatgtgccatagtttcttaatccagtctatcattgatggacatttgggttggttccaatctttgctattgtgaatagtgtcacaataaacatatgtgtgcatgagtctttatagtagcatgatttataatcctctgggtatatacccagtaatgggatggctgggtcaaatggtaattctagttctagatccttgaggaatcgccacactgtcttccacaatggttgaactaatttacactcccaccaacagtgtaaaaggattcctatttctccacatcctctccagcacctgttgtttcctgactttttaatgattgccatcctaactggtgtgagatggtatctcattgtggttttgatttgcatttctctgatgaccagtgatgatgagcattttttcatttgtctgttggctgcataaatgtcttcttttgagaagtgtctgttcatatcctttgcccactttttgatagggttgttttttttcttgtaagtttgtttgagttctttgtagattctggatattagccctttgtcagatgggcagattgyaaaaactttctcccattctgtagactttgccttcttgctatttgaatcttacttgtgccctcatccccaaacaaagccttattttagccaacgagagcttgttcccatagactctgagtagggttcaccgggcctgtcatttgttaacagaaattctaagtatctctcccaatgttggaaattggctttccactagggattttgtctttgaatgcttcctgtgcattattcttgcttaatttgctgaaataatgttacataacaaagagatgactttaagatgttattgatatatacatttagtatgtacccataaaaagtaaatttttttttttaaaaaaagatgctattgagtaaagtcctaagaaatacctcaatcttgttagttcattcagcaaggtagtagaggtgaagaaaacagatgtacagaggacaatggcttggttccaaacatttatgtagaacccaaggagagaggcctaatctcaggtaaaaaaatattttaaattgctagaagcagccacaaccctaatacaaatgtaggccaaatggctttttctgtccttttctatgtggaaagctcacagaaaagcctaagatcttatcataccacccaactagaaaaataggaaaataaaaggaagcttgtttaaacatctaggtcagaactaacataggctttccactccagatttgtcaagaatgtgtaaaaattcttaagaaaagcatctccatgctcatcctgccttgttgcgtagtaaaaagtattcaaagtgagaaaaaaaattgaagttttagaagtttaagtcttgaaagattaagagaaatagctaagtttgacaggtcccagaacacctgwtctcatcaccagatgagatcttcactgtagaaggggtgctggaggaagaagggtaggatgtcaaaaagctgagagtggatcctccgctgtttcagatctccagaatggtggacgggaacataacttaaaagagaacatgacagttctattgcaggcaatgatcattaaccttctaataaacatagtgaaagtctttactttctagtagagtaataaacaaaagctcctccccatacacacacccctttcaacaaaagaaaaaaaaaaaaaaaaaagaagaattgaaccatggcaaggtttcaccacatttggaatagaaccagggacaggaagtagaactttcttttcttctcttttctttattaggttcaggtgtacatgtgcaggtttgttacataggtaaacttgtgtcatggggatttgctgtacaaattatcttatcacgaaggcactaagcctgttaaccaacagttgtttttttttttctgatcctctcccttctcccaccctccaccttccaataagtcccagtgtttgttatttccctctttgtatgtgttttcatcatttagctcccagttataagtgagaacatgtcctatttagtttttttgttcctgcattcgtttgctaaaaaagatggtctccatccatgtccctgcaaaggacatgatcttgttcttttttatgactgcatagtattccatagtgtataagtactatgttttctttatctagtccactgatgatgggcatttaggttgatgtcacatctttcctattgtgaatagttctgcagtaaacataggcatgcatgtttctttatagtagaatgatttatattattttgggtatatactcagtaatgggattgctgggtggatggtagttctgtttttagcttttggaggaattgccattgttttccacagtggctgaacaaatttatactcccatgaacagggaatatgtgtaagggttcccttttctccacaacctcagcattatgttatttttttgactttttattagtaaccactctgactggtgtgagatggtatctcattgtggttttgatttgcatttctctagtgatcaatgatattgagcttttttaaatatccttgttggccacatatatgttttcttttgaaaagtgtttgtttatgtctaaagctttctttaactaatatttacagtgattttgactctttttgaaggccctttaatcctatcactattaaaatgttagaaaaatttttctttctgtaaatttttttcttctggaaataatacatccagtctctgattgatactgctttccattgtttctcatgtgtttcatttccaattatcacattatttttgttttgtctccattttttcatatgtctttggtgatgtaaagttcatagaatgatcacatttacaatttatggtaatattttgttagtgtagtcacaaacagcatgggttatgctaattcacatttaaatttggtgaaaggtcccccacctaaaggtggatataaaaacacacacagaacaacttgcagcttgcgtaattttgatgacccattaccttgaggacaaacatcaggattcctggagaggtcggcaataggaatgaaaatgtctaattaccttctctctgataccagctaaaaggatcattacaatgtaaaaatattgcatcagtcatattagtgttgataactagggattagtgctaaaattataatttctagcattattggagatacagactttattaaatacaaaaagtaatttacatggctggcattcttcttggaggccaggtgaaaccagtcctcagttcagtgcaatgaagtccagttccaggccagctaagaatcaatatataaggaagaaagatattttgagaaaaacttaataaatcctttcaacaaaatttggaattggcactattcaaattctaaaaaaaaaaaccctgactaaacccaagcaggattatttaaatcaaatatcctggatacccaataatggtaaacccccaaaatttcattttgtttgctgctgcaggtgcacaggaagatacccagttatactttgctttggcttgctggatttgttgttatgagctaaggcttctaggatccaaaactgcaacaggtacacctaattgtaattcaaatgtgtaaatcaaagatagttagatcaccaattttttcattgttctgcaaagaacctctgaatttctcaactctattgtggaccgaatcctctctgacacccactaaggaaaacacaattaaattacaaagttaccgtatttcaccaacataattaccaccactaagacttagttttgttttgttttttttttgctagatttgttttctcacttagttttattttactttccttttagtatagtcttttactattaattagaacttgcaatgtggtggtatactgtccgaaaacaaaagtcttttctggaagaatttcttatttccaataggattctttgcattggcaggaaatataggttacaatgaaaatcagtttttgacgaatacatatgaaggttctaatctataccaggctttctgccaggccctgaagaagtaacagtgaacatgagagacattgtgcctgctctaatgacactgcatccacatgaaatttatttgcttttagaatttgacaggccattattttgaagcgagcacatttcaaggtacaaagactggataccttatctctgccacttactaatgagagaacatagaaacttacctatactttgctttgcttttgtcatctatgaaatatggataataatagtgtttgcttcaaagagttgttcagcgaatagaatgagatcatatatgtctagtgcttagaacagtctaacacatgcaaaaagttcaactaatgttagtattaatttttattgaaacttcattagtgttatttagaaaatcaggaatggtttagaaatgttccttctgtgaataaggtagaagcgctatttgttgaaagcctcacggaacagtcttgcagttcttcataccacaaagtccattgtaacacttccttcaagtactgtattaaaagatgtattttctgaacttttgactatttggacatgtcctgctgtctttaagtgtaagagacaatttcagtgactctaaaattcttgactgcagcagctgctgttgatgcccacccatatcccttcagcaattacatttctggcacatcaaccaggattgtagctgtcagcatctgcatctctttgcatgaggaccttctctggctgtgagagcccaccctgctcattatgcctgtgtatgcagcaagtgagaagtgccttaaaagtaacactgcacagaagcagccctccaccaatgagtgctaggagttggttttatccacctcagtctcctttcctcttaggcagatgatatggtttggctgtgtgtccccacccaaaactcatgttgaattgtgatcccgagtgttggaagtggagcctgttggaaggtgattggatcatggggtggtttctaatggcttagacaccatccctgtagtgctgttccatgatagagttctcacaagatctggttgtttgaaagtttgtagcatttcctccttcattctctctctctctttctctctctctctctctctcctgctggccaggtgaagatgtgccttgtttccccttcaacttctgccataattgtaaatatcctgaggcctccctagccatgcctcctgtatagcctatagaactgtgagtcaattaaacctcttctcttcttaaattacccagtcacaggtatgcctttatagcagtgtgacaatgaactaatacagaaaattagtatcagagagaagtgaagcattgctatagagatacctgaaaaatgtggaagcaaccttgaaactgggtaaaaggcagaggctggaacagtttggaaggctcagaagacaggaggatgagggaaagttcgaaatttcctaaagacttattaaattattgtaaccaaaatggtgatagtgatatggacaatgaagtccaggctgaggtgttctcagatggagatgagaaacttattggaaactgaagtaagggtcacttggtctatgtttttagcaaagagactaaccacattgtgcccttgcccaagagatctgtggaactttgaacttgagcatgatgatttaaggtatctggcagaagaaatttctaagtagcaaagcattcaaaatgtggcctggctgcctatgctcacctgcataaacaaagaaatgacatgaaactggaacttatatttaacagggaagtggagcataaaagtttagaaaatttgcagcctagagatgtggtagaaaagaaaaacccattttctgggaaggaattcaagctgtctatggaaatgtgcataagtaaagaggagttgactgttaatagccaagttaatggagaaaatgtacccaaggcattgcagagatctttgtagcagcccctcccatcatagacctgaaggcctaggagggaaaattggtttcgtgagcctgacctaaggccccacccactgctctgtgcagcctgaggacatggtgtcctgtatcccagcagctccagctctagtcatggctaaaagggccccagatacatctcaggccactgttccagagggtgcaagccacaagccttggcagattccatgtggtgtgcagcctatgagtacgtagaaggcaagagttgaggttggaagcctccacctagatttcagagaatgtatggaaatgcctggatatccagtcagaagtctgctgaaggggcagagccctcatggagaacctctagtagggaagtgcagaggggaaatgtggggtttgagccctcacatgagtccccactggagcactgcctagtggagttgtgagaagaaggccactgtcttctagaaccccaaatggtagatctactgacagcttgcactatgtgcccataaaagccacaggtgcttaacaccagcccgtgaaagaagctggggaggggctgtactttgcagagacacaggggcagagctgcccaaggccttgggagcccaccccttatatcattgtggcctggatgtaagacagagtcaaaggagatgattttggagctttacaatttaatgactgccctgctgggttttggacttgcgtggggcctgtaacccctttactagcacttccccctttgcgctctctgtctcctgctggccatgtaaatttgtgccttgtttccccttcaccgtctaccatgattataagtttcccgaggcctccccagctattcctcctgttcaacctgcagaactgtgagtcaattataccgctttccttcataagttccctagactcaagtagttctttatagcagtgtgagaatggactaataaagtggtatacctgtgaagtgcatgttttacaccatttcagggtaccctggaaagattggcctataataacctgtggagaaaatttgcttgataaggcacacaacacctttccatctcaattctctactacttattgttgtttttttggggttatctccgaaataaacaacttacactcaattctttttctcagtgttgctattttgaagtatccaatgtaatttcatccttttactttaaacactgtaaatctggtaccattttcatataaaatctagagttgcagagaagtctgtgaaaaacttcaatattattttgttggaaattacctttttttctttattcttacatttaaaaaattgtcaacatgtatattgatatgggtgcttttcctttgatattttctgaaactttatgaattattttaatctgtatatttagatctctaattatcactaagaattttctctattaaacatcttattgtttctattccatttgttccagtctcattttcagaaatacctataattttggcataaattatctagcctgtatttctattatttcagtctaattatttgatattcaataagtttctccttgtctttaaggagagcttgcttgtctttcatgtaattgattccatctcctacaatctgttttgttttcacgacttccaatgcagcattttgcttttaatttccgtgcaattttctccagtatcactcttttcatcttaaaaggaagtcttttatctgtacctatgcattaggcatatctgctcctgttacctagagattacaacatttagcatcttattaagataaaagttgtttttccaaaactttttagatctttttagagatcattttttctgagttcaattagaaacttccttgaactgtactgttttccagtatctcaaaaagcattcaagtgaaatctatcctgaatttacagattgtcacatggtagtttgtgcattgcctttttccctctctgcccacttaggtgctggtgaaatctctcctctgttctatagatgaatggtgtgtaagtaggtatgtcttccatactcattcaaagtgggtatgactcttagttttgtttcagaggccagcctttatcctctrtggctcatcttacctgaaatggaaatgcaatagaactscattgtttggctctctgatattcagaacatctgaaatacatggccataattcttatatgtatgcatacatatgcatttatgttttcttgtcttacttgaaaaaatgatttaaaacaatccaatcctaactgtacattctaacaggtctctttctttgcccaattctacttaaagtactttaatttgataccatacttttagtttaaaatatcgttctcgggcttccttcttctttctgtgttgtttttattttacttttcttttatttcctggaagtgcaatttctaatcgatgcagatacaggtgaacacgtgagttcgttggtatatgcaaaggcagccatacagtaaaaggatccctgttcaatgttctgattggtggaaatttcaaattcctgaaacagagtcaacaaacatgtatactaactattcttttttggcttaataaaatgatgascagccaattataatttttatttcagtatgtcaccctttataatagaaattatatgcatatttttgaaatattgattgtgatattatcatattatgctttcttttgtcttcctccttgttgtcatagtactttaattaagagaaattttaggatgccacattagatgatgccaaccacccttaagctggaagttggaacattgagctttctgaagggaaaacttgcagtaagaataatgatggtctgggttcagaaagaaatgaattgaaatcctgactcaaatatttaacatctctgtgaatgtgagcaagttgtttcactcccagagccccaatttcctcatgagaaagggcagtaataatgtttatcacaaaaagctgttgagaaggctaaatgagagtgttatgcaaagtgcttagtacagtgtctgacacaaaagcattcaatgaacatggctaccatttagccatgagttggtctgcttctgagatgccttctcctggatggcgtgaaagtaactcaaataacctatcccaaatcaaatgtatcatcaactcccctatccctgccctatttctcttccagattttccttcaatgtgcatattagataaaaatccagaaaattagagaagtggtttgtcactccttgtctatactttcccatcaatgctatgtcaaactacacagggatataacgtttcattctaatcatgtaatctcactgaagtttaattttcctatctgtgaaaaaagggcaagaacagatgatttttgaggtccttctcctctcaaaaattatggggttttaagttaaaatgaggtgttttttttttttttttaaagattattgcttgatgttttgtgtggagaggtaaaggaaggggaataaatctagcagatcttcgacactcttaggaatgtcctagataatcactttttattccttgccattttatttttgggggatcatttatttgatactggatgacatgctactttatattaatattttcatatatgtaaacctctttttgctaattagattgtgagccccaagatgggcaagaccatgacttacatttctttctttgttgccagcaaagtaatatgaccatagaagattctcagtaaatatttgtagaataaatgaaagaataaatatatagaattaacagtccctgcagggagagatgcatcttaaattattttattgtatacatctttttatgggcagatattttcttttttcttagtaaaattcctgggaacagaattgctaggtcacaagacggattcactataatcgattgccaaagctttttccaaaggtgttgtgtcatttatacttccaccaaatgtgtgagagttccagttgttccacatcttcatctacatttgattttgtcagatttttaaatttatgatagtagggtgtgtttgtgtgtgtgtgttatctcattgtcatttgttaaagtcttttgcctatttttattgaattgtcctttcattaatttatagtaacaaaacatattttattactacatgttatgccatatataaagtatatctagcatgattactatatagatataatatagagagttccttatatattctgactataaatcctttgtaagatgtatttaatactttatcccaatttgtagcatacctatttattttattaatgctcgtctgttaagcagtaaagttttaaattttgactaagcataatttattattattatattcttttatgattcttgctttctgtgttctatgtctgcctactcctaggtaatgaacactttcttctagaagctttatagatttagctcttatgcttaagtctatgattcaactcaaattaatttttgtatttggtgtgaggtatgggttaaggctttttctcccccatatggatatccagttgtttcagtgacattcattaaaataatattcctttactccattgaattgctttgtgaaaaattaattttaagtatgaattaacttgtttaagcattttctttcttaatagattattttaatagaagagtattaattgctgagtcaaattcacaatacaggactattyttataataaattttaaagttatcatttgtagctaaaatagttttaataaaaagatttacattgaaggcctgcttatatttgagtgaggccacatgagagataatggaatggacaaatacaatggaaaggaacrgcaagaggtataaatgagccataagatgccatggtcaaagtaggtagagagataaggaaacagagaagggggaaggaaatgtagaccacacacatataatactgaagaacatggaagacaattttaaatttttggttaagaaaaataaattttaagatttttgaaatctacctattcctaaagatttagttttataccttatagttctttaactggactcagtttgacagagggacaaatgaacacaaattgtagtcatgaaatgttgcataagccccaatttactgtctgtcacacttttccagttcattgcttctgctgacaaaaatataaatttttcccccagggatgaacagatggagatcactatttcaccttgaaataacttttccacttacctatacacagtctttatttgagagaaaactatctgctgggttgggtttgctggaaaatttaaggctgcagtagttgtataggagagtacttatcataaatcatgatggaatattggttaatcagctatataactgactcactgtcttcttgcctggaggtttcttgtcctatcccatcttctatatgtattctaagattctgcccaatgctgtggattgcagttaagcaagcatgcagtgctgacagtcagcagggtcatttcccatctatttgatcctcacattctctagatatgctctaaattaatgacaaattgataatcagaaaatgcttacatgaagcatatactgcactgatcttttcagagaaaaagttgcctccttaaaaaacatccactgttggcaggtagagagtttatgtaaaaaatatattgggcatctcttggagtggcttgtcaatttagatcctcttctctttcacagtgacagtctttttatatttaattttttgtcaaaactaatatttttatttgaaaataaaatccttaatatgacatgcagaattcccaccaagcttgccttttttgaggcaacaaaatagacttcatattatcaatagaagagaaatgtaaacataggccagtttataagccgaaaaacttaattttgcttatattattatggttaaatatatcatcttgggaataaattttttcttcttaaagtggtgcttgattacactaattttaaatgacttttttggacatgcagctgtatgagttaaatactgcatatatagtagtagcatgctactataaagtagcagaaaaaattttagcctgaattttattttggaacaaaagaaaagtaaaataatgaatttctgttttctcctataggatagaattcagcatatttaagtactttatgatattaatttttcacctcatctcaggagaaggaattgactttatgatctataaaatacaaaacaaggaccttaggagattttttaaataataatattattaaccactatattttatgattttatttacagatttttttatatatataggatgctgttttgtaaatggactgaggggagaggtaagaattcctggctttgaaaattactagtgctctggggaattgttaaagttacaagctaactaagaggaatattttctatcttttctaaccatagctgcaggtctcttcatttaaaaataagccttggtttgtttttaattccaaaaccaacatctgcatatcaaataagcaaaagtgatcatctgtgggtgggccttcaaccacgatttaacaaaggctttgacacaagcattaagggtctcctgccttactctgcttcagcttaagccaatgagggggacacacagatgtagaattaacttcctcccctttcttctctccttcccctgctttgtgcaataaattagattttgtggtaattttgtgccattggaaactagtagattcttacgattcatgcaacaatctgaagataattttttatggagctgatcttgttctctttctcttaatttaaagccttctttctctttcccgtaaagtactgaaaagtatgtrgtaagctggtattgtgcgtttactattcagcaagatgcaaaaaatataaaaatattattttacatattttaaaaattttacttagaattactctacaatgtaaaggattaaacctctgattgttcatattactttttcagggacacaaaggatacagccaggattaggaatcaagtagctcagtttctatctagtctgcagctttatgtatggtacacacctttgccttgaaatcagttgataaaattttctttagagacaggaaatatattcaataaatagataatatgatatgcagtttactgtcagaaagagtgataatagacttcaattctataaataagccctcccaaaattttataacatggactaataacttcacaaagagttgccagtagttattctaattttggacattggaaaatctaggttagagttaaaactagttcctttactgctacacttgacaaaactctgtactaatctacattcccaggaacaatataaaagaatttcacttactccacattcaggccaatacatggtattgkctattttttwtttttttttttttttttttttttttagccattctaatgggtacatgttggtgcctccttaaggtttttaatttttattttcctgataactagtaatgttgagcattttcatgttatcatttattcacttatcttctttgatgaaatgtctgctgaaataatgttttaagtttgaattgagtttttaaaattagtattaaattattctttgtatattttaaatacgactcatttgtcagatgtctatattttcttcgtctgtggtttaccattttatttatttttatttattttttaaattttatttatttgtttatttttgagatggagtttcgcttttgttgcccaagctggggtgcaatgcgtaatcttggttcactgcaacctctgcctcccaggttcaagcagttctcctgcctcagccttctgaatagctgggattacatacagtcacaccaccaggcccagctaattttttgtatttttagtacaaatagagtttctccatgttagccagggtggtctcaaactcctgacctcaggtgatccacctgccttggcctcccaaagtgctgggattacaggtgtgagctactgtacccggctaccgttttatttttttaatggtatctttacaagagcaaaacgtttaaattttaattaaatctaacatttatttgtggtcttcactttttagtgtgttctatataaaaaaaaatatctttcccaaggtcaaaaagatttttcttctgtttacttctagaagctgtatattatttgctttgctgcctagccaatgatctggctcaagttagtttttgcttatggtataaggtagtggtctatgctcatttcgttatccccatatggatgtttgttatttcagcataatttagtgtaaaaactataaatcaccatttaattaccttggcacctttgttaaaaatcaatttactatattaatctgattttattgcttttgcatacattatgtctatctgtaaaacaatattacactatctttattatggtcattttctagtatgttgctatagactgaaggtttgtgtccccccaaaattcatatgttgaaacctaattcccaatatgatggtactagaaggtgagcctttgggtggtgatgaggtcatgaaggcagaactctcatggatgggattactgtccttacagaagaggcttgaaagtccctttgaccacgtgaggacacaaggagaagatagttgtctgtactaggaagcaggtcctcaaaagacagaatttgctggtcttggtctgcccagcttccaaaactgagagaaataagtttctgttgtttataagccatctagtctatgatcttttgttacagcatcctgaatggatgaaggtatatgtcttgaaattaggcaggatatgtcttctaactgtttccaaattattttgactatcttaggtctcttgcatttccatataaattctggaatcagtttgtcaattcctacaaagagcttactggttttagttcctattgcttagaatctatagttggatttgtcaaaaactgatggctttacataactgagtgtgtagattcatgaacatggtacatctttccacttaggtcttatttaatttctcttattgatagtttattgtttttggtgtagaaattttaaaaaatataatttacttcatttctattacatgttttgagattctatggtaaatatatttaatattcatattttatattttaactcctagtaaatggaaatatacttaatattgactttaaatcctatgaccttgctaaacacagttattagttctagtagagtttcttctctataatccctagaattctctgcatacatattcatgtcatctgagaataattttttttatttccaggcttattgcactacccaagatatcccataaaattttaaatctaagtagtgagcatggacatccttgtctagtttcttatcttaaggagaaagcattcagtagtaaaagcattcacaagtaaatgtgttatctgtaggttttcatagatattattatcaagttaaggatattgactctattactataatactattacagtccatgtctagatcactatatttatctatctatagcaattagtttaataagtactgtctttgaggacactcattttgagagtcacaggacaatctcttgataaacattgtactgccttttcaataaaactcctatgttgcatttttaatatatattttatacaattatttcttttaagttatttctccctcatcctttacatatgtaggtgatttccatttgcattctcttgcatgtactgtttattttatttctgtatttaatttttggctaaattttttctctcatggtagacataagtaacacaagaggtcataatcttatcaattatattttttatgtgaaaacttacttatttacatgagtataaagtcttttaaacttgaatgctgttgtgtaattataaaacattattaaaaattcacttgaaatatacaaaattgaaagaaagtcagtaactttctactagctttattgtcttcacattcagattaaaatttttcttaccgtgtggtaaaacatttaaattggtttttgataaattattattccaaatattacaaaagtttagtctattaggctgactataatgcatgccaaggtaattttgtctagaatgttcagtcccttttagcattttctctttattttctatatttattgtatcatttatagtaaagcatctttatgccaaggctcagatgtcactaaatagtgatcctcttttttgttttaaagacagggtctcacactgttgctcaggctggtcttaaactcctggccwcaagcaatcctccaacttgtctcccaaagtactgaaattacagtgtaagccaccatgcctggtcccccacccaccttttttaaacagcataactaatttcaggaaggctttaaaacttttgtaattcatatgacttgtattttttctcaacataatcagataaagaaacgaaaaagaaaaatgtcaaactttttcacttcctcagttcacaattctctcttttttctacaatgatttatttttaaaaatgataaaatttattagcttagctgttaatttaataaacacattaaataagaaccaaaaataatgtatttatataaccttatgtttcctcaggaataagtcaatactgaaaaacttatctacagaattttgaagttttaccccttggtcccaatattcatcatttcacatggtaccttaaatatgcttttgagcacatgaattcattcataaaagaatgttcagttttcaacttttattccaccttttttttatttcattacctaagaaataactgtttattttaatctgcaggggatagtacagtagtaagcatgcaggcaccaagcatgcagactatctgattcaaacctctacttcttcacaaattaactacacattcttggcatatgtatttaattcatttatacatatactttataaccatatctcatccaattcataatgtagttgctaagatcaaataatgtttttttgataaagtgaataccatagtgccttgtacaaagagcacagtaattactgccttaaccttatatctcatatacgaagaacagatcaacataaaactagaccaacgttaaaaatacctttttaaacattttattgtatactgtacgtatgtttcatatgcaaatatatattaacagaaactgtcatataacacatctttgtacattacaagttattgtgaacaactggccaggtaacaagcattatttttaatgacatctgcattccaacattttttaaaatttatctttgaacattgaggttgtttcaatgtacaattaaatacttctaaatataacctaacttaaaaatgtatgataaacacaatatcatccatttgtggacataagatgaatatatattttgaaacaattaatgggcttatagaaaaacagagaaagtcctgtttattattattcatactactcaccaaaaagacttctgttttgccttcagtgtttcctattacaaaccctaggatgaatgttgatgaaggcagtcaattcttcatccattctaggacctgatatttcagtaattacattaaagaaaagcatcagcaatactaaatgaccttgattatactgaatgcgagacgaatgattaaaagtctggatgaggcattaattttctacctaattgttgtataatttcaaatgactattctatttatttccccctctgggtaaagttattttggatgaaataaaaattacattggaataattggcaaagatcatggatagaaacactgttactcagcaagggacctagctgaacagccttgtcaaagtaggttaggaaatttcygatgactatagccagtgtggccacatttttaaagatagcaatccattatcacttctcttctgccacgtgaaaaaagaagtcagccctcagaatctgattttctcctggggtgacgtggcactgctcagaaagcaatgaaacatctctttcctaaaatatgaactatcggatgacaaactctaaacccaaatcttgttgttttgttcctcatccattgtgtatctaaggatatagaaaacttaaataatttttattctcctatatttgaatttaattttattttgattatgtcagtagtaaaaacaaaatcagctgcaattattttctaaatgatgtaatatgcccgacggatgccaaaaaggggtgtatggtatatatatcatagttttatagttttatatgtatatagtggtttatataatagtattgatatattatgtatatgttttatatatatgtagttacttataggtatgtagttacatagagagaagatataacacttttttgttggtatgcgaagagcctatgagtataagaacagttgtaaaaaagactctttggtaacgggaaattggtaagtctcagtttggtgatattatcatttatttaaatcagcaaaaatcttaaaattcattgtggtaaaattactcaakggactaaactcagaagagaatttgctttcttagtgtagaaattcactcaaagaaagatgactagttttcttttagttcttctagaaacagattcttaaaaatgaattcataggatgaatttcaattcctaatattatacttttgcagaaaaaagccttataaaaaggctttattttgaaaaaaatcttagaatattttcagtttatcaaataaatttagtgattatggcagagacagtcattactcattggccatccatatgcaatccacatttccttcatcgttggaactaatattgaccaatggattgtgagtggaaataagaagtatgacttgaaacaattaagaaccagtgcgtgactctccaacttccctctgctttgtcattgaaaccaatgaggcaatggagcagctacaagatactgtagtttctgacaacttgggtcactgagtagttgtgtagaagagggattttccccagtaattcacatggaatgtgtcctttgagcaagaaagaaactacttgctgtaataagtcactgagatttcaggattattctattactgcagcataaactgggctatccaaattaatccagtgaattaaacttaaaaaatatgatatgcagatcaagtttccttggtagcaaatatggttttaaaatggaaaaacaaagtaaatggccaagagcatcttaattcttggcaaaatgtgaactctgttgaagaaattgatagaattgtcatcccatttccaacaactaagctgatgcatttttagagcccctatgaaataagttttctttatctaagaggctttgctgctctcagagcaattgacgcagacaacttatgtggcacagcagacaaaaatatctatgagtccagggtaaaggttttcaaatagctctgtatgactattcttctgcttttctactctctttctcaagtggaaagtattaatgcttatctcatatatgttcatatgttgttagggttgcttaaataaaatgttttagttatgacttctgaccaccccacagagggaacaaaacagcctaaaaatgtactatgtgtatgtaagaaattatattttttcattgcctgtacatacagcactgacacatggatatacatacatataggacactagaatgtgaaggcatatggtgaatatttaagaaactaagacctagcatttatggaattctcatattagtattggagaaaattggtcttatcctactgtaatgcattatatcttttttacttttgaatattgaaattaaaatgtattcacaacggcatctgactcaaattcatacctatacatttctgatcgtaggcctcttgatatgaaaacaaacattctatatgtgaagaataattttctgataactttcgaagcaatttcctacttatttgcaaatacagtgatgaatctttggcaaattttatgcaagaagttacacatatacacatatcacctgtctcctgttgccctacccaccttcaaaaaatctttaaaaaaaaatcaaaaacaaccaaagacaaaaccaacttaacaacagtgactttcaggtagaatgaagaattaaataacaatttataatttctctagtttagatactgtattaaagtcggggtcctttttacatcccaagcagaaacttaaacattctgtgaattcattagcataattttatctgaaatatccatcccattctttggatctcctactgccttcaagttctcctcttctctcttttgaattttgaatagttataatgaaaataacagtaattcttcactttttccttcttatttgattggaatctattttttgtattaggtttatttctaattctaatttttgtcctgactcattgtttaacttttaaaaaaacttccttctaatttatgttatcttgttgtatgacatatatcactgaacccatcttaaatccttttgggagtagtgaagatgaaaaataaaacatctcctatactaattttttaaaaaactggcctttatatttaaatcatgtgggaaacacattttgagacatcttgattatttgagccatggtttattctgtaaaaatagcaaggaaaaaataaataattatgaccagccttattgctgtttatacctcaaatatatatataaattcattttgaagcagtcattggaccacttactttaagaaaattcatccaaaattctccctagctaaaattaaattcagggccttagaaatttttcatctgagatattattttaattatattttttactttttaacttgtctcctccatcaattctttctgatttttccattcctgaaacatgcatatctgcctgttcttaagctaagcaccagtctttccatttcatactcaaaaatcacctatgcaccgatagtggatgagtrttacttcatggactcagagtgattgatgccatagcctgcctaggtccctctgtcaagagtgattccatgactaaactctgacacactgggaaagagcactggatttctgcttctgtctagcacagagatacagggaagaatggagacagaaatacctgtaaggtatttatcatcccaattctaacagctcattgaatgctaagggtagaaacaaatgacttttctagtgtcattatgaaatgtgatctaaatttagttttccaaacttatttgctatttttgcttctcataattcattcttcagtcaatctgaaatagatagatatagatgattagatagatagatagatagatagatcctatctatcctgtgtagatcatattccttaatctcccactcagctgtaagagatcgctctttgtacctccattggttatttcttttcctactttcaagtttgagtgtttttgtttttgaatgtatgaccaaaatgtccacatgttgggagtgagtgtgtgtgtgtgtgtgtgtgtgtgtgtgtgtgtgtaaaggtaaatttctgcatctgacttgcccaccatcatgattaaaagtcactgccatttcagacttttttttttttttttttttgagacagggtcttgctctgttgcccaagctggagtgcgtgcagtggtgggatcttggctcaccgcaacctctgcctcccaggttcaagcaattctcctgactcagcctcccaagtagctgggattacaggtgtgcgccaccatgcctggctaaatttttttatatttttggtagataaagggtttcaccatgttggccaggctggtctcaaactcctgacctcaagtgatctgtccatcttggccttccaaactgctgggattacaggtgtgagccaccatgcccagcccacaagtttgtttaattggactttgcttggggcacttattaattatctctcgccttattaggtgggtagttaactctaggtgtagcctctaatttttcctacttgaatacacttcttgaggtcaagggctttaccttacccataattataccctatgtagtactaagtgtaatgccttatgtataatgcctaataaataattgtttaattggatttttctaggcatttacaatatagtctccaatggtggtctggtattgtagttattttattagaagtaattaaaaacaaagttaaataaagcactatttttttttagaaaagaaatggattcaacgtaaaagaaattccacactaaaggcgattttaaaaaggtttgaacagtaaaggctaaaaaaaattccaatttgcttttgtttgttggttggtaactttatcattatagaacaagaaaagctgattatggctttggaactttaatacaccaggagagatataagtctgagtgttgataatagaaaatatcctgtggtctgacatgaaaataatttaaaattttaagagagtgtaattgctacctttttaaacttctttttaaaattttgagtagtgaaaccttttaagaaaataaaaccatatgcagaagattaataaacaccatagatacaagcagaatttccctggtcaagacaaaagcatccccctcttgacttcctccttgtgtcccttggcaacaccctaaggacctcttctgaaccctatgggtcaaaccactgttctttacagtgcttatgatcagcataccccctaagtaccctaagtagcataatgtttatggtgtcatgtggtgggctgaataatcgtcttccaaaattacaccctaattcctggaacctgtgaatattttttacttcacatggcaagggggactttccaggtgtgattaagctaaggatctccagataaattatcctgaatcatccaagtgagaatcctatttagtggagtgatccaggaaggaaacgtgatgatggaaccagaggttgrggtaatacagttgctggctttgaagtttgaagggggccatgaataaagttgtgacaaagcttttagaagctagaaaaggcaggtggtccattagagtgtctagaagaaacactgctgtrctgacaccttgatttttagccttgtaaaattgattttagagctttgatctctagaactgaaaggaatgcattttattgttttatgccactagattcatagccatttattacagtagcagtataaaattaatatcagtaataagctaacaacaggtgaatgggcatgtcctggattatggttatttgaactaatcaacaaggtttcccatattagtcacatgccgattgtttatttcccttatagcataaaaataatttataatttctatggttgcaccagaattttaaactatgaataacatgaggcaaatttttatagaatttaataattgtgtgtcctctcattgctttcaaagtgttttcactttgtttcatcttctacacacacacacacaagctctcagggaccattaacccattttacctatatcaaaagtttaatattaaacatagacggtaacaaataatttaattcaacaaatttataatacttcaggttcctctatgatgctatcaggcaataataaaatttgcaatagaaaatcatcaatgcagagagcacactatctgttaactcatctcaattttgaaaagctccaatatattcagaaattcttccttcttaaaacttgaacaccttgaacacaggcagggtgcggtggctcacacctgtaatcccagcactttttcagaggccaaggcgggtggatcacgaggccaggagatcgaaaccatcttggataacacggtgaaaccccgtctctactaaaaatacaaaaaattagctgggcgtggttgcgggcgcctgtagtgccaagctactcaggaggctgaggcaggagaatggcgtgaaccccagaggcggagcttgcagtgagccgagattgtgccactgcactccagcctgggcaacagagcgagactccgtcacaaaacaaaacaaaaaacgaaacttgaacacctcggtaccagatttatcttttgctgacacatagcagatagctaatgacttacctaaataaggtcatctaaggacaacaagtctgctacctcttcctttcattgcccwcttatttccagcttaaatcctaatgataactacggtttttgggacttctccccttttcatcattccaaataataatcataatcatgatcaaaatcttatcatcatattaattgattctgccaccttttggcatcattatcatcatgtgggcaggagacaccctgagaagaattggttggtttcagaatttatttatattggatggtatcttcctctcattgctttctttttgttctttttcatctaaattttatttttcacagaaatgacagcagcagaatatgatctgatgaattctggtctcttttttcacacatcattttataattgactcttgtatcttctttggtcttcttattagatttaaaataatttaaaatcatagcaagtaaacaagcaaatgaaaatttgggtcaaatgaaactaaaacaaacaaacagaaacaccaccaacaatagcaccatgccattttctggtctgctttgcttttattttatgataatgagccaattcttaattctaagaaatgtgatggtagccttctgagcccctcatgttgattcatccttatgagatgagaaaagtagagggtgtttctttcactttataaagtcatgagtctgataattgatagagattggtgtcattctttaagtccaaatctagtgttccttcttccctgatatttttcttggtggcaaaccaaactatggtgcctgaaaatttcagcatgggattccataggaggccattttgggttaaatagttgtattataccaaaagtacatttctgatgataaatttcaactgttatgaattgctactaaatttaaccaatttgctcattattctgactaatttagcttccaacttggagaagtaaagcatgactgactgagtgcatgcttcagtctggtagggtttctttaggaaacttgaaaatgatcagagatgttaattgctttgctgctggctttactccctctttcagagaatcttgtctgtaatgtattctgctaatctcattctatgcacaagcaagagctgcttcctttccatttgttttttaaatatgccaatgttgatttaatttattttcctgtgttgttcagcttgggttttctacttcttttccatgacaaataggaacattaacaaatacagagatagaaataaaattcaagtttcttatatttctttatatatttttttcttttctattaggaaaacactactttggtacttacatgtctattacattccaacagattttttgatcaataaattatgcagatggaatgagtgttcttttataatttagtttaagagttccctgcttcttaaagggtaaatgcctttttccttcatatttgaaagcacttaaattgaaagaaactattactggttgttatttatatctagtcattctatttatatatcatatatttttacatactatttttctgtagcttctacagacaacatagaggcatttattcttataggaaacaggcaaattgcataaaccttctgggcttcagttccttcatttttatattaattcaacagtgattgattgtttaagcccctttcctatgtgctgttagagattggggaattgagggtaaataatcacagccaccatgagatgcttacattctaattggagatggggtgaggaaggagtgagagcaggtaggtaaaagagatatgagtacatgtaagctaagttctaaaggatgagtaagaactaagcaagtgaaaaaggcatggagataggagcagacagggaagtccaggcaaagccgatagtttaactgaagacatgaaggaaagcaagagtcctacatcaagggcagctcaagtaaggaggaattaccagatcaaaaaatataaggcagagaatggatggaaatgagattacagtgtgatggaaataagataacagagagtcagcacactttgctaagtagtttgtaattcatatgcaggtgatataggggaactgtcgaaacatttaaaacatggaaataatggggttatttttgtgattaacatagattactctaaaatttatgcagtgaatggatttgagaagtctaacaacattgataatttcaaatattccattgtccccatgaattctttttgttcatgagacaacatgaactatttattgtgatttagtaaatatggtattgctttgctctgtaaaatgaggacaataatatttgtatgacatcacccaaggaaaagagactgtaccttaccactttaaagttctaatgcagcatatgcatttaatggagagtcactaactttctaacatcttgaataaatacttatctttggtatctatgacatgttagatattgtgttaaagtgcttacatctgggtactaatttaatttggataataacccaacatagagatgtggtataattacagctcactataattatatgtgctatgtgctgtgtgtgctataataccttattttagtctcatagcagccctgataaggagctgtggttattccccattataaaaatggtaaaactggttcatagagctttatttaaagttttataagtagtaacgatggggataaaattaaagctagcactgtgtgcctttactgtgtgcctagcactttggtctagaatgtgcctttaaagcctattgatatagaatgggtcgatagcacagtgtgtggtactgtccttttggaggaaaatgagaattcgagtcccataatttaactagggattcacagcagtggcagagccaatccaacccacttctctgatttcaggtacagtgtcctttccattgcactagagctgtcttcctactttatccataggctgcactcagaaaaccaatgctcctcatgaccaacctcagactttgtggctctgattgtcttctggactgtgaaacagtgcttaggcctgaatatgtatgccacgggmacacacacacacacacacacatcacatgatcaacaaatgatcacctgttttctgggttgtgtttcaaaatatcttgattgtattttgttggtatctattttttaaaaatggtagtggaatttgatttaccagcctacataactaaccagagtgcatcactcctcaatcatttattacacatttatctcaaactacaggagaggtttttttttttttttaatattttagatcactcatttccagtcttatgttcttctacaaaggatctacattttttcaaatttgggggaaagattgaagttacagtttatatagcccaattttttttcagtatgtcagctctatagatgttaaaaagtaaataacagccatttcaattccaatcatgaaaaatatctcttcatctatttatttactcattatatatacaaatcacccaattgtccgtttgtcatcaaatcagttctactggaatcttgtttctctctctctctctctctcagctttcattgctgatatttgagtttcaaattggaattattgcatagatgatgggaagaacaagctttcttgagagagaaaacggtatctaaatcctaaaatcctgaggagcttccgacctccaacataaaatgcttccactttttcctctttaaattttacgttttttatttttaatagtttataccttcacttggttcaaaaaccaaaataatataacaaggcaaacattgagaagtcttgtttctattcctttcccctgtaggtagctatttttatttttttggtataattgtaggcatatttgagcaaacagaaatacacacttttctgcccttatctgttctttcataaaagaatgcatagcatataaaacttacttactttttttttcttttagcaacggtatttttttcctattattcttgtaacaagtgtccataaacttagtggcttgaacaacatgagttactttacacttctggaggtcagaagtcaaaaatcagttttacaaggctaaaatcaaggtttgcagagatggttctttccggaggctccaaggaagaatatatttattgcctttgcaaattctagaggctcctttggcactccttggccaggccagcagccaaaccactccaatatttttttccatcttcccattgttttctcttatgccctcaaaactcccttcagctccttgttaacagaaacaatttgagattacatttagggcccacctagataatctaggataacctcctcatctcaagagcttgaatttaatcacatttacaaagtcccttttgtcacttaaggcaagactcaggttctgaagattaagatgtggatatcttggtgggaggtgttattgttcatcacgacacagcagcatttcctaaatatcaatccatgtcagttattaggtaggcagcttttttactttctttttatagttttatagtatttcatgtatagctttaccagggtttatttaactaattccctaatcatggataatttttgcttttacagataatgctgcaatgagcaaccttatgaaaataacattttggacatgcacagatatacaatgtattatatataaatataaaaccattaaataatgaaggatatgttattcaatattaactttaatatttattaaacattaacagtaaaattgtattaaatgcatatatgtttatgaatggacttttataattagtgtatgttacttgttagaatgatatagtattcaacattaatcgtttttctttttacaggtgcgaagtttaagaaatcttgttcacacaaataggtaagaaagcggttatagcaatatctctcaattctttaaattattttgtaatcacgtatacaaagcaaaatagtgatctatcactaaaaactaatgacttatcaactgacagcttaattatgtgctcctgtaacttttgttatatgcaaatagttggaaaacactgaatcacaaaatatttatcatttctttcccattcatcagaatcaytcaccttttcaaaatcaaaagtagtattttgaaaatcattgctacattttggctgttctggggtttttacctcctagagtaatgaaagatggyaaaatctaggaggcatgaaataagatgtaaattggggaagaaaaaagaagaaaagttaggaaaagaggcagaactcaactacatgttccttcttcagcagatcaattttgtttctgtgcacttaagagagttgaagatctgaaactcgattcctttaaaacatcactttttgtgtactcttgaggaagaatgaaccccccagggtattcataccttaccagtataaagaatgaagatattcactatttcagatgatattctcagacaccaaaggttatacttttacttccttcttaatagcatacataaattttggaagcactgcattacagtaaagggtctctgaaataatcttccttcaagagcaaagaaagtttgtctcgtctacttaattaaattctccagaataactcctggtgstttccaaatatatgtaagyaataaaaccttgtggaatgggtgagtgaaagttacggagaataaatgtgatgcataaacacctagttcaaatttggtcagctttctgttcatctgccagtttcttctaagggcgtcagaaccttggtcctaataggcagttcagccgccattttagaactgtagcagggaagtaagtgagactgttcctgctggttttgatgtctggctggggctccaaagcagagcacagtgggtgttaaatgcccacacattctagaaaggtgctagaccatctaggcagaatttgttggaaggtggcccaaattggttccaaacatctaacctatcaccacctccagcctatacataaaaggaggctagtaaattaatgggtgagaactgacaaatgaagatttccttaagaaaaattttggagtgctatttttttttcctctcccatttcttggagggggcagggggcggagaatgtgctcttcttcaacttaagccaaataaataggactccaagagaatcatccgaagggtggggaggtataaacactcatgcctgactctcactgtaaaagaaatagctcaaagctgtctggtgttagctgagaagcagaacaaagagagagggctccataggggatggcttttatttccagtgtttgctggaaaaagatatgagtttttccttagattaagaggttgttgagtaatgtaggcaagctggagcctggatggcgtgactccaagrtctgtgtgggacatttgcaagaagagagcagctggagaggagaatgtgggagatatttgaagaaatttcaagagagaatattgatatttaggcaccggccttccagagagctacaattttcactttaaaacagtaccagtcaagtaagaactttctctccttttacctcctcttcttctcaccaacctccttccacccttgaaaatataggaatgaygacctagaagcaccagagcaaatgtaggagtgttggaacatggagagtaaaaaggcccccacttcccactttttgttacaggttttctagcaatggcgtctgaggtgtgagagaagttttgattgggtatgagactggaactatagtattagatttcactggatatttaatacttgaaaatgggactttcttaacaatgaaggtggccagaaaacattcagatctgatatgattttctgttggtgatgggagatctaatagcaaggaattgtgagaaactatagtcatttcctgttgattgttccatgtttaactcaaactggttacataacaatacccaatatgttctttttttaacccaagatttcaaaatgatttgttgagagctcattcatatcctctaatgtgaacttctttataaccaattttaatgaactatgcagtagaatctgatgtgagtatcaaaaggaacagagaagttatacttcagtgtaggaagagagaatgtcagcccactgccttaactcagttggcattttgaagaaaattgacagagcccacctccagattttattggggtgggggaaagaagagaaaatggaagatatgttttaaaccacttttggcaggaaaagtcatttccctatttagagtctggaataaaaatgtagttcccattaagtaatttttacttacttctgtataacccaattaaacacccctcatattcccactctcctgcagtaactcagatacgacttaatccaatgtcatgtgggcaccgtgcttctacgttttcgtcttaactttctaaattcccaaattcttcatctcactagcttcaagtgaatttttcagtgggaaagtactctgaataatatgtaatatttcttgtgtgttgcctttgtgacaacttgttctaagcactttatgtgtattacttatattactataacttctatactataagttattactataacttctattgttggtatcattgttattctcatttaaagatgtttcagtagaggcacagaaaagctgaataacttttattgctggtaagtgtagggccwgaatttgaatccaggcatcttgctctagagccctaacattttccaatctcattataaactgcctataaaagaaacttgcttttccattccaggttgacaggcagggtggcaacacatataaaaagcatcttaggttccactagtcaatctctttttggagtagcttccactggaattctataggtgttgattcatttttacataaccaatgtctgtaaacctgaagatcaaattcttatggtaggaaataagacagttttaaagatcaaatttccaagttcagggaccatgaaatgtcaattgaaaaccaggagtaatgagctgtaaagataaatcaatacatggaaagacaggatgagtattttaagcagctgaaataacttgtacttacacaaaaaggaagaaaatatctgaccacatcagactgtattttcctgagatcgctgcaaaaatctctctcattccaccagctctactaccataagtttggaaaatataatctgccacattgacctaaatgttaaaaaataagcaataattaccaagttccttacatctcccttcataggaaaaactcggagtttataaatttcagaagcttaacacccatattgtaaaatttccctttcatattattgatgttgccagcaccctcttaatgccatttcttttgctgtgccaattatttttcaatgacagtgacataagaagtaatgtgccatctgcatggccttttactgcattatgttctcctaggatagtcttctagggcctttgtgactcctgcttcctgggagccattctagactcttctctgagtgccatgcttcttccccagcatcctacttctccagcccccctaccattctagctgtgtgggctaccccatcctgctaactggaagatggatttctattatcaaacrtaatttatttcaaggaagatagggtaccatttagaaacctatctttttggttatactgcaaatctcaatttgttgtctattaactgccaggagtatactcatactgcaaatctcaatttgttgtctattaactgccaggagtatactcatctctctaaaaggttattattggggaaaggggtctttcctcttcaggtccacacagcagcagctctctaatgaagttttgaaatatgagctgtgaaggagccagaggcagtgatggtgctttactggccagcagttgttagtttctcagtggtctaaagggaaatatccaaaaaccaacctgacttatggagaactgtgagaaaaatactcttaacactttaaggtggcaatgccaacattcaatggcctctccctcccctttgaggaagcttcctggcgccagggtgacagaatgagatgtatgaggtctggtttagatgtcttccaagctggccttttgtctgctatcccagcatcacaaaaataacttagggtgagaaatttacaggccagcatgtaaattccctcattactttattaaatagtttgaaaggaacatgattaagaaattaaattcaatcgaatgttactgtaactggtttttcatgataagcgtttttcttaatgttaacagaaggctgatcctttgtgtggattgaattgtgccccctataagacatgtccaattgctaacccccagcaccagtgaatgtgagcttatttgaaaataagggttttgcagaaatactcaagttagcatgaggtcatactggattagaatgggccctaaatccagtgactggtgcccttataacacaaggagagaacacagaaagacatacacaaaaggcayatggaaattggagtgatgcagctataagccaagcaaggccaaggactatgagcaaccccagaaactacacagagttaggggaaggattcttctagagctttcagaggagcatacccctgccaacaccttgattttggacttcttttagtctctagaacagtgagggactatatttctgttgtcataagccatccagtttgtggcaattgttacagcagcccaaagaaactaatgcagccctatatatgaaaaatatggtaataaccttacattttttttcaaggagaaataaatatagtagcttagaacacagattctgaaaccaaacttactgggtttaaatcccatctctgccagttactagctatatgaaattgagcaacttaacctctctctttctcaattccttcatctttaagtggggataataaaagcgtatagattatagggttgttatgagtattttaaaagttaatatttgtatagaacttagaacaggaccctgcacatattaaatgctatataagtgcataagtgctttttcatttggtagggtctttccaatatattccctcatagccacccctgaaaaatgtttttccaccacaaaatcttacctttgtttgcctattaccccttcggtaatttctcttaacattaaactctatcaaacttagagttaactaatcttgaaacaaatttatgacatgttcctgctatttaattattgcaaaaaataagcagaaatgtatttatttgttgagtgtttatcaagcatctactgcacaccaatttttgtgtttgaaaaaaataaattcatactctataataatagagtctatagtctagtggaaatattgaatgttggagtaattcactatatacattctcctttgatatgaatacttacttgaattactggaagcagaaacattaaaatttatagaattcaacattatttgaaactttgattgcattttgtatttgcaaacacgtcttccatcttttcacatcctacaccttgcattttgctactcctcagatcctgtttcaggaggatatgccactcttatttacagagaggaactggaktcttggcttagaccaaatgtaraggagtctccccttatctgtggggtcacttttctgagttttcacttacctgtggtcaacacaatccgaaaatagggagaacagtacaacaagatattttgagagagaacacatttatataactttaattacagtacattgttataattttctattttcttctttgatattgttaatctcttactgtgcttaatttataaattaaaccttatcatatgtatgtacatttagggaaaacatrgtgtatctrgggttcggtactasttgcagtttcaggcatccactggagatcttagaaggtatcccctgtggataaggggggattactatactatcatttcttatcagtttgatattcaatggtttctctttgagatgctaaaatgttaaatgagyttttgcatattaattaagtctagccacacaaatcagaagaaactaggaatgggacacatggaaataggtgacacctgccccagctttctatctggtatattccttatttttagatatgaaaatatctttttttgtgtcaggaccactgattagcaatgacacaaaaaattagagcttttagtgatcactgaagttatttcagtatgctttgactaaggatttgtgtccctccccagtgaatttggggagggatggtcccttctgtccgtttgtttaataccccacatttctctgagaagtcctatcattttgatcatttctaatttaaacsgaaggacaccctttgtgcattcttttctcgttgctgtttccaacagcagtggtttaaatgggaaggctgagactatagattccaccacatcacttgaaatgccaacttggcagtaatcattttattctttttagttcagaacatgtattttaaaaatgaatgggtattgactagttaacaactagagattttttttccaggaaacaatttcctagactttaaaccaaaatttggagctcaagaaacactaaagaagacagtactctatgtaaagtagttattaattggggtttcactgtaggtctatatgcaaatcttaacttttaaccaaaaaatatataacaatataaagtgcaaaaagtttaagctttacacagaaaatgtatgatacaaaatcacttttaacttaaaaggcagtttaaagtttatctgtgaagaaagagaaacattttgtacataaatcctcccagttttcattgacaatgatggtgttatttaagcatccctgtaattaaatgtcactttaaaaataatggacgtgtcagggtatctttttaaatggaaaaaaagtatatttttgtagtattaacagaagtaatactcaaccaagatttcccaaattacagaataaaattaatatcttctttttttcccccagcagtgatctcttttctatgattccttttctgtgaacattcaggactatctgaacgaaatgggacccccatctcctgccacttctggagaacaaacaacccactcaaaaccatttacccatcatcactgtccagatcattgcacagggtgggtttatatgatatgcccactctgaaaatgtggctaagtattccaatcatagctgttgccagtgtttcccaccattgctgtatactcttagtaaatggtagttgttaaaaatataaaataggcttgcttcatgagaagaagaaagtactttctcttgtaaagttcctttaagcattggcatagtaagtgttccttttctcattgataccatagtttttttactgtgttttgttttgctttcttcagattttaaaggaaaaataaggtgatgttgctgattttcagaaatattttcagcttcagatatctgtgataaaaatgagaaaaaagaagtggatgttctgtcagaaggtattggtgagataggagacccagaattgggagaagcagcttagatggagagcaacttaaatgggagaagtgatgaacatgcgtgagaaaaaagtgactctgctccctttgtgatcggggcgaacatgactaactgatccaggaatttgtttcatttggtcacgaatgggctttgcaaatccttcctaatgacatgacagtgtcacctactggcaaagcaggaccctatgaggcatctaaagggagatttagccagatatgttgtttatcagaagccaggtacttcctccacttttcatcctccctacttttcctttctacagaaatgattttttttcaggacagtaatttaataaacatacatactttgtgctcagcactctactaaatgcttttatatacattatttcattctacattcaccaaagtgtaaagagataggtgcatttccattttctagatgaggctcagagaggtaaaacaacttaaacagacagaaagttgtagaattaagaatgatacatgttagactccagaaagcatgctctttagctctgtaatagatcattctgtctcttcagtttaaatgcaagggacattaatacctctctagaattttactcaattctattgtcttcctcctaatttacttcttaactacctaattcttgaaacggattagaagcagatgtaaagaagtgtccttattttcttctaggtatgtctttgcattattgaagtgtatctcattctttagattgcctagtcttaaagtccaggtggctaagtttattcaagcaattaattggttgattgagaggtaaaatactataaaactgattgattgactagcatgacaagactccgtataaaagtggatgtatttgttcatccattacctatttcttaacattttctagaaaattaagtagctacaatatacaaaaatagaatatagcataaatataaattaaaagatgtaataatgaatctacttttaccaggtgtagtcccagctacttggaaggctgaggcaagaggatcacttgagacgttcaaggctgtagtgcaccatgattgccccttgtgaatagccactgaactccagcctgagcaacaaagtgagacctcatctgtaaacaaacaaacaaaactgctcctgaatttcaatgtcaatttattgtagaaatcttaaaaacttaatcctcctaaaataatgctgtttttaggggcaacacataattgtgtacaatttcatgtttcttttgaagtgataattaaaaataattgaaacagttattaaagaataaagacattgtgacaaagaaatgaccgggaaccacataaagcaagatattttgtactttcaaataatgctgatttttagggctaacaagtttcagtagtagcttaataaatatacattaagaaatgccctttctgaattccattttatgatgttcaagtacaaaaaatattcatccattgcgactttgaactgtgaaatggtcaatgaagaggtgagcggcacttaacttgaagctaatgtctcatcgaattgttcgaacttcactccttggtcataaggttttccagatccagagcaaggtagccatatggcattgatattcgaaatacaaagccaagtatcggttttaaaaacagtattattgatttttttcttcttttccaattttctctttttgaaattgtgctgctacaaatttgaattttaaaatgtcttatttttcaaatttgtattgtttcatctattgaatggtttttactttaaggaagttcagaaagtttttatgttctcagccattcttttttatagaaaatatcttaaaaactgaaaagcctctgaaaggctcaggtgaacgaaaatagaaaaaaaagtatctatctcactcttctttttaattcctctttaatgcttcccttacaaatatattggaaagaaaactatttaggtggtacaaggcttctccctggtttcatttttcttgctcgtatatacaattaattatttgtggcagcattatttttactttggagccctgatttcccacaattattggtctgatggagctcagacctgtgtttcagagttaaatactcttccaagaatttccacattataaaactccccaaccagcactaaactgtacacataaaaattgtaaaaatggtaaattatatatgcatattgtaccttacaattttttttataaaaaataaagatttttttaaaaaaaacaaacaaatacctcctgccccacaaaaaaaatttctcaccccatccaagtaccagtcactagactctaacaaacagttcggaattcaactggtgtccaaaaggttaacaacattaccaaggtgaaggaaccaaatcggtatcatacactggagccatggggaagcttttggaactaggatttctgagaactttttaccatatacagcagggaaatctttgtaaaaaggaggaaattggtatagtatattctgctgctggcacgaaacgtgtttttaccaaactaaagtatcctgtagttcaaaaatgttatcacaagattccatttgtgtatctatttaaagttttggtatattttcaataaaaattaataaaaatatttcttctcataatatgtggtttaaatccagattatttcacaatatgtggtttaaatccagattatttcactgtaatatgtcttgatagagttttagaatattgaaatagggtattaagatgctttaaatcgattactgatttgaacattgtaagtgtatatttctatttgtgtgtgtgtgtcatattcaaatatgattaatcatgtatgttggtgtgtgaacatatgcatatataaagcatttttatcagctgtttctggcttcataccacagagaacaatctgaactgtcaaagaaaattaaaccttgagtaagaattcctcaagctagtgcatatcatttgttgttttcattttcctgaaatgaaaatattagcgttgttactacctgaatagattaaaagactaaagaaaatttgttcattagagatttaaaaaaagtggcagtgtttgtagagtcaggcatagtaccagcatgacatggatcaaatttgtcccaataatttgaattattgttattatatttgggtggtgtgtgtagttggggggggagtggttgttgtttcatattttcccttaggggacataagtaagtaagtatttacagtaaacccatagtgagttcagatgaagcaagaaaggtaagtatttatcttcataatttcttagaccagaagaagtaaaagttattaaatacataattaagcatccataaacaaactaaataattacctttgtaccttgtacttattatgaaaggtttataatatgtaactcatatgatgtgaagattctctttagtcattacataaaattacatttttgacacagataacctaccttccttccctcctaccttctttcctcccttcctccctcctacccttcctcacttattctttcactcccttctttcctctttctgtttaaataaaaaggtctcatgattttttctgtgtaatttttgttttgttttctttaaaattccctattttgcaatcccatcaaaaagtgggcaaaggacatgaatagacctttctcaaaagaagattagacaaccaaccaatgaacacattaaaaaatgttcaacatcactaatcatcagggaaatgcaaattaaaactgcaatgagataccaccttactcctgcaagaatggacataattaaaaagtcaaaaaacaatatatgttggcatgaatgtggctaaaggggaacacttttatactgctggtgggaatgtaaattaatacaaccactatggaaaacagtatggagattccttaaagaactaaaagtagaactaccatttgatctggcaatctatctcaccacttggtatctacttaaaggaaagaaagtcattatatatatgcaaaagacacatgtaaatgcatgtttatagctgcagaattcgcaattgcaaagatatggaaccaacttaagtgcccatcaaccaacaagtggataaataaaatggtatatatagaccacggaatgctactcacccataaaaacgaatgaaacaatatcttttgcagcaacttggatggagatggaggccattattctaagtgaaataattaaagaatagaaaaccaaatattgtatgttttcagttacaagtgcragctaactatgaggatgcaaatgcataaggaacatttaatagactttggatacttggcagggaaggttgtgaggcaggtgagggataaaagacaacatactgggtacggcatagatgctcaggtgatcagtgcagtaaaatctcagaaatcactgccaaataatttattcatctaaccaaaaaccacctgtaccccaaaacttttgagatttttaaaaaattccctattttggatacattctttaactttccaaggaaaataaatttgcttcctgcatgacaaaactatcaattttaattgtaattgaatatttgttaagcaaaaatctcttgcaatttttgtccacgtgaaacactgcttccatatctcagatgagatcgggcacattcagggtggtatggctgtaggctgcttccatatttcaaactggagatcattaaaagttacagtttatgatgctgttatctctgataccatctggataatacctggcagtataaaaagcctgagcgtatatatcaattaaggctattttctcattccagtaggtcttagtgaaactccatgtggaaatgagtctatacaaggaaagaaacttgttcaaatttgaagggggacaacagacagcaagtgaagtatgcaggagttttatggaatgtgagctgaggaatagctaataaaattatgcctgcatgacttcgtatgagaggagggtcaaggaaggtgaatgttaaattgacaaaggaaatatttcaaggaaaattgcagacttaaatggactcaccctttctcataactgagacctagaagcttagtgtgttaaactcagctctggagactttattcatgaaagcaagttttgagacaggatagaataggttatttgggtccctgaacttgaattgaattgcctaggaagaataattttttaaaaagcttgagaaggagggggtggagaaaagaaggctgaataggaacagctccagtctacagctcccactgtgagcgatgcaaaagacaaacgatttctgcatttctgactgaggtaccaagtgcatctcactggggattgtcagacagtgggtgcatcacagtgggtgcagtgcactgagcctgaggtggagcagagcgaggcatcacctcacccgggaagcacaaggggtcggggaattccctttcctagccaaagagagaggtgactgacagcacctggaaaattgggtcactccgaccctaatactgtgcttttccgatggtcttagcaaatgacacaccaggagattataccacatgcctggctcagagggtcctacacccatggagcctcactcattgctaccacagcagtctgagatcaaactgcaaggcagcagcgaggctgggtgtggggtgcccaccattgccaaggcttgagtagataaacaaagcggctgggaagctcgaactgggtggagcccacygcagctcaaagaggcctgcctgcctctgtagactccacctctgtgggcagggcatagccaaacaaaaggcagcagaaacctctgcagacttgaatgtccctgtctgacagctttgaagagagtagtggttcttycagcatgcagcttgagatctgagaacagacagactgcatcctcaagtgggtccctgaaccccaagtagcctaactgggaggcaccctccagtagggacagaatgacaccttacatggccatgtactcctctgagacaaaacttccagaggaacgatcaggcagcaacatttactgttcaccaatatccactgttctgcagcctccactgctgatacccaggcaaagagggtctgcagtggacgtccggcaaactccaacagacctgcagctgagggtcctgactgttagaaggaaaactaacaaacagaaaggacatccacaccaaaaccacatctgtacataaccatcatcaaagactaaaagtagataaaaccacaaagatggggaaaaaacagagcagaaaaaccgaaaattcgaaaaatcagagcgcctctcctcctccaaaggaatgcagctcctcaccagcaacggaacaaagctggatggagaatgactttggcgagttgagagaagaaggcttcagatgatcaaactactctgagctaaaggaggaagcttgaacccatggcaaagaagttaaaaaccttgaraaaagattagatgaatggctaactagaataaccaatgcagagaagtccttaaaggacctgatggagctgaaaaccactgcacgagaactacatgattaatgcacaagcctcagtagccgattcgatcaactggaagaaagggtatctatcagtaatggaagatcaaatgaatgaaatgaaatgagaagagaagtttagagaaaaaagaataaaaagaaaygaacaaagtctccaagaaatatgggactatgtgaaaagaccaaatcgacgtctaattggtgtacctgaaagtgaaggggagaatggaaccaagttggaaaacactctgcaggacattatccaggagaacttccccaatctagcaaggcaggccaacattcaaattcaggaaatacagagaatgccacaaagatactcctcsagaagagcaactccaagacacataattgtcagattcaccaaagttgaaatgaaggaaaaaatgttaagggcagccagagagaaaggttgggttacccacaaagggaagcccatcagactaacagcttatctctcagcagaaacactacaagccagaagagagtaggggccaatattcaacattcttaatgaaaagaattttcaacccagaatttcatatccagccaaactaagcttcataagtgaaggagaaataaaatcctttacagacaagcaaatgctgagagattttgtcaccaccaggcctgccctaaaagagctcctgaaggaagcactaaacatagaaaggaacaaccagtaccagccactgcaaaaacatgccaaattgtaaagacgatcaaggctaggaagaaactgcatcaactaacgagcaaaataaccagctaatatcataatgacaggatcaaattcacacataacaatattaaccttaaatgtaaatgggctaaatgctccaattaaaagacacagactagcaaattggataaacagtcaagacccatcagtatgctgtattcaggaaacccatctcatgtgcaaagagacacataggctcaaaataaagggatggaagaagatctaccaagcaaatggaaaacaaaaaaggcaggggttgcaatcctagtctctgataaaacagactttaaaccaacaaagatcaaaagagacaaagaaggccattacataatggtaaatggatccattcagcaagaagagctaactctcctaaatatatatgcacccaatacaggagcacccagattcataaagcaagtccttagagacctacaaagagggacttagactcccacacaataataatgggagactttaacaccccactgtcaacattagacagatcaacgggacaggaagttaacaaggatatccaggaattgaactcagctctgcaccaagcggaactaatagacagctacagaactctccaccccaaatcaacagaatatacattcttttcagcaccacaccacacctattccaaaattgaccacatacttggaagtaaagcacacctcagcaaatataagagaacagaaattataacaaactgtctctcagaccacagtacaatcaaactagaactcaggactaagaaactcactcaaaaccgctcaactacatggaacctgaacaacctgctcctgaatgactactgggcacataacgaaatgaaggcagaaataaagatgttctttgaaaccaatgggaacaaagacacaacataccagaatctctgggacacattaaaagcagtgtgtagagggaaatttatagcactaaatgctcataagagaaagcaggaaaaatctaaaattgacaccctagcatcacaattaaaagaactagagaagcaagagcaaacacattcaaaaattagcagaagacaagaaataactaagatcagagcagaacagaaggaaatagagacacaaaaaacccttcaaaaaatcaatgaatccaggagctggttttttgaaaagatcaacaaaattaataggcctctagcaagactaataaagaagaaaagagagaagaatcaaatagatgcaataaaaaatgataaaggggttatcaccactgatcccacagaaatacgaactaccatcagagaatactataaacacctctatgcaaataaactagaaaacctggaagaaatggataaattcctctacacatacaccctcccaagaataaaccaggaagaagttgaatctctgaatagaccagtaacacgctctgaaattgaggcaataattaatagcttaccaaccaaaaaaagtccaggaccagacggattcacagccgaattctaccagaggtacaaggaggagctggtaccattccttctgaaactattccaataaatagaaaaagagggaatcctccctaactcattttatgaggccagcatcatcctgataccaaagccgggcagagacacaaccaaaaaagagaattttagaccaatatccctggtgaacattgatgcaaaaatcttcaataaaatactrgcaaacccaatccagcagcacatcaaaaagcttatccaccatgatcaagtgggcttcatccctgggatgcaagactggttcaacatatgcaaatcaataaatgtaatccagtatataaacagaaccaaagacaaaaagcacatgmttatctcaatagatgcagaaaaggcctttgacaaaattcaacagtcctttatgctaaaaactctcaataaattaggtattgatgggacatatctcaaaataataagagctatctatgacaaacccacagccaatatcatactgaatgggaaaaactggaagcattccctttgaaaactggcacaagacaaggatgccctctctcaccactcctattcaacatagtgttggaagttctggccagggcaattaggcaggagaaggaaataaagggtattcaattaggaaaagaggaagtcaaattgtccctgtttgcagatgacatgattgtatatctagaaaaccccattgtctcagcccaaaatctccttaagctgataagcaacttcagcaaagtctcaggatataaaatcaatgtgcaagaatcacaagcattcttatataccaataacagacaaacagagagccaaatcatgagtgaactcccattcacaattgcttcaaagagaataaaatacctaggaatccaacttacaaggaacgtgaaggacctcttcaaggggaactacaaatcactgctcaatgaaataaaagaggatacaaacaaatggaagaacattccatgctcatggtaggaagaatcaatatygttaaaatggtcatactgcccaagggaatttatacattcaatgccatccccatcaagctacaaatgactttcttcacagaattgaaaaaactactttaaagttcatatggaaccaaaaaagagcccacatggccaaaacaatcctaagccaaaagaacaaagctggaggcatcacgctacctgacttcaaactatactacaaggctacagtaaccaaaacagcatggtactggtaacaaaacagagatatagaccaatggaacagaacagagccctcagaaataatgctgcatatctacaacyatctgatctttgacaaacctgacaaaaacaagaaacggggaaaggattccctatttaataaatggtsctgggaaaactggctagccatatgtagaaagctgaaactggatcccttccttacaccttatataaaaattaattcaagatggattaaagacttacatgttagacctaaaaccataaaaaccctagaagaaaacataggcaataccattcaggacataggcatgggcaaggacttcatgtctaaaacaccaaaagsaatggcaacaaaagccaaaattgaagggatctaattaaagagcttctgcacagcaaaagaaactaccatcagagtgaacaggcaacctacagaatgggagaaaatttttgcaatctactcatctgacaaagggctaatatccagaatctacaatgaactcaaacacatttacaagaaaaaaaccaacaaccccatctaaaagtgggagaaggatatgaacagacacttctcaaaagaagacatttctgcagccaaacgacacatgaaaaaatgcttatcaccactggccatcagagaaatgcaaatcaaaaccacaatgagatgccaactcacaccagttagaatggcgatcattcaaaagtcaggaaacaataggtgctggagaggatgtggagaaataggaactttacactgttggttggactgtaaattagttcaaccattgtggaagtcagtgtggtgattcctcagggatctagaactagaaataccatttaacccagccatcccattactgggtatatacccaaaggattataaatcatgctgctctaaagacaggtgcacacgtatgtttattacggcactattcacaatagcaaagacttggatccaacccaaatgtccaccaatgagagattggattaagaaaatgtggcacatatacaccatggaatactatgcagccataaaaaatgatgagttmatgtcctttgcagggacatggataaagctggaaaccatcattctcagcaaactatcgcaaggacaaaaaaccaaacacctcatgttctcactcataaatgggaattgagcaatgagaatacatggacacargaaggggaacatcacacaccggggcctgttgtggggtgtggggggtggggagggatagcattaggagataaacttaatgttaaatgacgagttaatggrtgcagcacaccaacatggcacatatgtatatatatgtaacgaacctgcacgttgtgcacatgtaccctaaaacttaaaagtataataaaraaaaagagagagagagaaaaaagaaaaagcatggaaaaaaaaaaaaaagcttgagaaagtgagggaatgagaatctaatctgtggttatctaccagcttcatcatgaactaattgcatttttataccatttcagatggtccttagaatgagactgatatctccatctcccagtgccataggacaggatctcacaagctcttgggaattgtgtggttaggagaactaatccgagggtgattttcaaggatctctaagataacttcatcatctcttccctctgaggtamccccacccccaacacacacacaattttcatttttttctgacatacattgtctttacatgcaaaacgattatcaacagcaaaatgataatatgttttaagtaagtgggcctagtcacttttacattaatcattgattcataactttttaaccacccagaaccttttctattatttgctctctactttatgaacctcaagatttgaataaaagaagtcttcacaaaaaattgttcataataagtaacaactcatttccattagttccttccactaaataagagccagttgaagattcgataatcataaatatagccaagggcaaagaaactcaaaaggttataaattggaaaataatcacacccacagaatgtcattgtgaggattaagtgtgttcatatgcgtaaagcacttagaatggttcctggcgcacgggatcactataaaagtgcttactgctcttgatattttaattggtctgtgaagacttatagcaaacacatgtctaacttccataaagtttaattttctataatcagtagattttgaaaattaaaaaatacttcttgagtataaaggatcttgcatttgactataatagcatgtacccccctggaagggagatgctgtaatggcattgattttcatagtcctggtctatgtaatataggtttttgtacctaggcactcaatctgttgatatgtttatattttcatgatgtatgaggcagatattatgcacatgcatctgctctagaaggttaatgataaaaattggttataaagttttaaaatagtcactatattagctatataacttttataatttgaactggttacattgtggcaagttgtatcacttacagttaacactgacttgccaaatttcttaacagtgacagcaggaataattgccccaaactagaaattgagcaaagctttcccttaataaacagtagagaaataactaagaacagaaacggggaagaaataggaagataaaggacagtctaagctaagcttataccgtgaacatacttaattagccttccctccttgatttatgttgcatatttataaaccctctgtaaactgcaagtgtaacaaaggtattttattttattgatttttattattatatttctgatcactgtccccagccaggcaacatcagtaagamaaagaatcattgtgacaggtcctagattttagttgcattggccaatgtttacttttccagggctgaatatagcagccctatgatgctgagatccaatagcattcagtacactgagcctattcttgctcaaaagcaagtattcagggttgtgacaaaggttggcaaagaccagtcagctagaatgaatagtattatgtgcagctggctcattgcatggtatctaacaacacatcaaccagaactgattatgtcaaaacagaattctctaagttagagtcttggagtcagcacttcctaaaggataaacatctcagaatgtgcctttgtaagaactctgaggctactcttgaatgctgaagggtggttttgaaatgttcagtgactccattagactgtgtgttgaacatgtggacacctcctccatctcttttgtcagatctggacatatttctttttaacattgtattttttaacagtatgtttcttgtgaaatgctgcaatagtttgttaataagtctgtaatcygctattacaaagccactgatgaattgtataaggttagttaagtttatgttaaatataaaggaagcagacattcaagaaatatgagggtaggatggggaaagagactcattaagatggtagaagaattcttatttaatttcctttttatcctttgtaagaattacacaatctgttgctagcatcttaatctttagttatgcacacacaaatttcatgccgtcttgttaatctcatcactttctcattagtacaaaacattttycaacttcattcttttctgggtgagggccaataaaactacagaaaaaatctcccatttaagaaaatatctctaatgtctttttcaaaattaaagaatgcccagaagtttttgaaataaggtatgctcatcacatcctaaagagcatttttgttttaccactctttcttatgtcagtacttattaaaatctacctagagtgtggtcgatttccagtggaactttgagtcttctgggttacaagagataagtgaaaaatatttaaagaattgttttttatgtgctatattggtaattactatatcactatatattttaaatttaaaaacattcaattccacttccattaatggtgccatcaattttcctacttttccaggtttggaacatcagagtcatgtgtgtttcaatgtcttctctactagactctgagtagtcttgtttatatcacattaacccaaagcgttaccatctcacacctgaaccacagccagagcctcaaaactgatcttcctccaactggtctttgctacttacttcacttgtagagtgcttttcacttatctttttactttgcttgcttggatcatctctctcttccctcaggcattttgatggtcttctattgccttatagataagatttaaaatccccatttgtctttcagaaacctctacaatttgaccctaaaatgctttctcagatgtatcttcttatctttgtgtatataaacctccctttccagccaaacgtttctgcttacataccttctgtggaaagtggaaaatgactccccaacacctcccagcccccactcccaacaaatatgcctacatcccaattgctagaacctgtgaatgtgttaggttatatggaaatggagaattcagattgcatatgaaattaaggttgctactcagctgacattaagaggaggacattatgctgcatttttcaagtatgcccaatataatcccaaggcccttgtaagggaaggaaggagacagaggagagagacagagagatggaagtatgagaagaattcagcctgatattgctcgttatgaagatggagaaagcaaggacatggtccaagataagcatgtggtctctagaaacaggtgaagaaaagaaaatgcattatcctccaaagcctccagaaagaaacacaaccctatagacatcttgattttagcacaatgagacatattttggacttctgacttccagaactgtaagatagtaagtttgtgttgttttaagccactaaatgtgtagtaatatgttacagtaataatagaaaaaaatgyatcttttattgaattcaacttattaattacataaaatatatttcaccttagttagttgctacttacatgttcttatctttttagttatattataaattagtgagagcagggagttagtataccatatttcttatgagtatggttatatatgctatacagctttggatatggcagatccttgggttttttaattgataatctaatctaagtcggctattttttaatacttgtaataaattttcatcatagaggtaaattctcagaaaagatatagttacagttccactacataatattcatttatcaatttgtagtcaagagattctgtcttcttaattgggtaatatgaagagcatctctgaggggttgctacctcaatttactaaattaggagagtagacctagtgatgcaaaaggatttgcacataagtaartagttacacagaggaagaacacaagcttatattgatcacatatgtctgactctaatttgctatcttgatttccaaagtgcttgcttacaagatgaaatgagctactcagtactgggctcagctgtgtggatcggagtcacatatcagtttcaaggattcttaacagaccgttggaaagctataatagacgactgatgctacataaagaatatctaaacagtatragaatcgctaaatcaaaatcccacatgggggaggtaagaagagaaaagaaaataaattgctttatttacaataaaaagctatcttgtttgcagattacaaggaccaataggcacaaataagtgctaatattggattttttattgaacttgaaattattttctccttatttaaaataaaaaaccctttctgtgacacaattaatttagtcaaacttatcgatagtaggcacatctgtactttctaaaattccaatatttcaatctgtttccattttatgaagataactacagatgttgtaatgcctacaaagatgcaagagatgagttggtactcctaaagtcacctggaaaacctttacaaacacccatgccagaattcaatgttatagcagaatttctgcaagtgcacctgtgcttgmgtgcatcttaatagttcccaaaggattctaaacgtgcaggttagagagtcactgagcttgaagatagaagacataatttttatacaaccaatcggctccccttccctcagatgaagtacaaaaagatttaaaaattttaaaaagagttcatcagctgctgaaattcaaagataaacattttataatttttctgtgaagctgcaaatatagtaggtgctatggtaaataatgaatgtatcatgtatgtgtaaagggaatcatttcgtgaatcttggaaaaaatatgacatttcgatggggttcaatataaaatatcaatcattacaaaatacaatgtgttcatcattttaattctattcaatactagagaaatactgaccttcattatacatctgaaatgaatatttttaaaggttatctgttttctttctgtatagttttagttttggcatctgtggtgaattttggcatttgtggcaaattcaacaattccctgtacaaaaattaagaccaggcaaaaaaattgtagccatctacctcatggatcaactactcatttatttaaaataaaatcgttgtaacatttctataccagatgttacattttcctctctatttttaaatagataatttgttagaaataggagaatggtaaatataatgataagattcttaaattaacaacatgtagcacatgaatgtgctttatctttatagacccattttaacattcaaatttactaatctaaggtgattccaaccaagagaacaataagcatagtcaagatgatggcaaatcagtactataaatctatagttgaaaatatattttgaaaagctttggaaaaggtaattccaggtttcaactagtaggaaagctttgggtgctatataaagaagatactattccaagaactacttaacattgaaggcccaaaagtactaactgtaattcacagagtgaattataagcaatagccagactgaccatgtaaagcccatgagaatcagagacatgtgaaaagattagaaagcaaaaataaaataaaataaaataaaataaaaatactgtgtgcagattataaactggcttatataaaaatagagttggccaagtggttcttaaaagtaaatcagctgggccaggcgcagtggttcaggcctgtaatcccagcactttgggaggccgaggtgggcggatcacaaggtcaggagtttgagaccagcctgaccaacatggtgaaaccccgtctctactaaaaatacaaaaattagccgggtgtggtggtgggcgcctgtactcccagccactcaggaggctgaggcaggagaatcgctttaacctgggaggcagaggttgcaatgagccgagatcatgccactgaactccagcctgggtgacagagcgaaactctgtctcaaaaaaaaaaaaaaagtaaatcagctggtttcaccatgatggagtagccttatttttccttggtactcacacttacgatgcctggatataaggcaacaagcatggtaaacactgaaaaggacttgaggatcccaagataatcaattatctgggtttcctttctgcctctcatataccctgaacaaggtgctgaaaaagcctacaacttggagctaccaataggcccaggcaggaaaagctccaagaaaagcctgtcttcagtagcaaaggactggaaaaagaatggcctaaagacagaaaaccttttttggcaatacctgccctactgcagctaaacacaaacctaaaaaatacatacaaacaaacacaaacctcatggtttcagtggggtgagtgtggagttaatcccctactttcactctaccccatggaagaaggtggtggtcctctaatcccctagccagtggttttagtaggacatggctggaaactgaccttctattctccacctaccagtagcagtgccccagttctcccatttgagtagtttcagtgagatccagctataatctgagcatccatgaaaacccagcaataatgagacttgatggtggagtgagacgtgagactatccactattagaattcatgcatctcctctccatggtgtcaatggggctgagtgtggggctgagcctccacctcatctaacatcgctgagactgaacaagatggtagaagttggggttaataaggccctccattatttctctaacttcccttccccagggaagcccactggggagctgaactcctgtatcactctggcagtaacaagacggaataaggtggcctgagcaaagttcataggctctcttatttttcatccactctggtgtcggtaggccccagtggggatctgagccttcacctccatccggtatcaatgagacagaatggagtggtgtgaggaaggatagtagatacattttctccttctttgtcttaacagggcccagtggagagctgagcctcaacccctaccaaatatcaagaagccaaatgaagtaacaggcagcagggctaatgagcacaccactccttccccacttttccctagtatcagaagggcgagtgagagcggagtttccatcgtaattctgctagaacaaagtagtatgagtcaggcctccacatctaccaaaatatatcaaactttgtgggaggtacctaaagtgtgctgagagggaaatttatagcactattgcttaaaccagaagaaaggaaataatctaagttcctatttcaagcagttaggaaaagaatataaaaataaactcaaggcaatcagaagaaaggaaataaaaacgataagagcagaaagcaataaaattgaaaatagaaaaaaacacagaaattgaaaaatgaaagctggttcttcaaaaaaatcaatgaaattgataaacctttcataagactgagaaatataaacagaagacataaattattaacatgaggaattaaacaggggacattacaacagactctgagccattaaaaagataaggacatactacaaacaactttatgctcatcaatttgacaatctggaagaaatggactaatttctcaaaacctacaaactacaaaaactcaatgaagatgaaatagacaacctcagtaataccataacaatgaaacaaaaaaattggtgactaaaagtctcccaaaaaagaagcctccaggcccagattgtttaatggagaattctaccaaatatttaaataagattaattccaattttgcataatctcgtccagaaaactgaagtgaaggggaccctccacaacttattttatgagaatactaataccatgatatgaaaactagacaaagacattacaaataaaaggaaaactagagaccaatatctgtcataaacttagaagcaaaacttatcaccaaaatattagcaaattgaatccagtaatgcatagatttagtacaagtatgtaaggctggttcaacattaacaaattgatcagtataattgaccatataagcaggttaagaaaaaaactcatgattatatcaactgatgcagcaaagttatttgtcaaaatttaaaacttactcataataaaaagtaactgcaaactatgaatagagtgaaacttaatcaaactgataaagagcatctacaaaaagcccacaactaacattctatttaacagcaaaagactaaaaacgcttcactctgtgggcaaaagacaagaatgtacactctcattacttttattcaacatagtactggaagttctgcttctgcaataaagcaagaaaaaaataaaaagcatgcagatttaaaaagaataaataaaactatctctatttgtggatgaataattgtccatgtagaaaattccatgaaaactgcaaaaaccattctagaattgaaaagttcagcaaggccatgtgataaaagatcaatatacaagaatcaatttcatttctatatactaataatacacatgtggaatccaaaatcaaaatcacaattatttataatttacaattgccccaaraaaattatatactttatatactccaaatataaattttaagacaatataacccagtatgctgaaaattacaaaatgctgatgaaaaaattcaaagacctagctaaatggagagatattcaatattcatgagttgaaagcgtaaacatagtaaagaagtcaattcatccgaaattttgatgtattggtataatggtatttctatcaaaattcagcaagatgattttgtagacattgacaagtttatcctaaattttatatggaatgatgtaggccctaagaaaggtaaaacaatcttgaaagagaaaagttacataggaggaattacagtatctgatattaaggcctgccgtatagctacaataaacaagacagtgccatattagtgaataaatagacacatagatcaataaaacagaatagagtatcctgaaatagccccacataagtatggcaaactgatttttgacaaaggtgcaaaaacaactcaatgaactgatgatagtcttttcaacaactagtgcttgagcaattggatatctgtaggcaaaaaacaaaaaacaaaaaacgaaaaaaaactttgacctgtctcacatctcatataaaaattaaatcaaaataaaacatggacttaaatatgaaggctataactgtacaacttttagaaaaaaaaatgagagaaaactttttgaacctagacctaaccagtgttctttgacttgacatcaaaagcacaaaccatttaattaataaattagacctaatcaaaattacgaacttgscaagttacaaactgtgataatccatgtgaagtggaggaaaaaaataagctatagactgggggaaaatattttaaatctatatatccaactatgaactaatatctatacacacaaagaatttcaaaactcagcactaaaaagaaatgcaactagtaaatggaaaaaagacataactagacatttcactaaacaagacatatgaatggcaaataaccacacagaaagatgttcaaaatcattagccattgaagaaatacaaagtaaaatcacagtgaggtgtaactattaatacatagctatcagaatggctaaaataaaaaaataatgacagtatcaaatcctagcaaggatatagaaaaagtagatcattcatacattgctgatcagaatgtaaaatggtacagtcactctggaaaaaattgagttttgtttttgttttctaaacctgaacatgtatctatcatataagcaacatttgcagtcttgtacatttatcccatagaaattaaaacctatacatcaaaacctatacaaaaatgttcatagcagctttaatggtaaattcaaaaacctggaaaccacccaggaatgcttcaacacatgaatggttaaacaattgtggtacctccatatcatgaaatattactcagcaataaaaaggaggaaactactgatacacacaacttggatgaatctccagagatttatgctgagggaagaataccacttccaggagtccacttataaaacattttttaaatgacaaattgaaacagcaaagagaatagtgtttgtcaggggtcaggaatggcagggggcatggtggtacaggggaggtggacatggctatgaaagaggaaaatcatggatccttgtggtgatgaaacttttgtatcttgaatatgtcattgtcaatatacccatagttatattgtactttagttttgaaagatgttacttttgggagaaatggaacaaagagtatgtgaggtttctttgccttatttcttagtttttaaatacacaattacttctaagtaaaagcttaatttaaaaagagttaatcagctgtctctctctcagaaggataacaaataatgtttactttttggcataaatcctttcatcaccatgaagaaatttgcatttacctaaagataaatgccaaatgtatatagctcactggtttgcaaagcaacttcacaaatgttgtctgatttaactcttccaataaccccatgagtttttatctctatttaatagatgaaaaaattgagagtgagaacatgtgatatgcccatgttatctccctgcaaagtaacagtaagagctcagtctctatgtgtagaaaccttttccttccctactactgctactccctttggttttcttcctctattcagatatatgatttctatcaggacataggcatgggaaaagacttcatgactaaaacaccaaaagcaatgtcaacaaaagccaaaatagacaaatgggatctaattaaactaaagagcttctgcagagcaaaagaaactgtcatcagagtgaacaggcaacctgcagaatgggagaaaatttttgcaatctatccatctgacaaagggctaatatccagaatctacaaagaattcaaacaaatttacaagaaaaaaacaaacaaccccaacaaaaagtgggcgaaggatatgaacagacacttgtcaaaagaatacatttatgcagccaacaaacatatgaagaaaagctcaccatcactggccattagagaaatgcaaatcaaaaccacattgagataccatctaacaccagttagaatgtagatcattaaaaagtcaggaaacaacagatgctgaagaggatgtgaataaataggaatgcttttacactgtttgtgggagtgtaaattagttcaaccattgtggaagacagtgtggtgattcctcaatgatctagaactagaaatatcatttgacccagcaatcccattactgggtatttctcaaaggattataaatcattctactataaagactcatgcacatgtatgcatatggcggcactgttcacaatagcaaagacttggaaccaacccaaatgcccatcaatgatagactggatttaaaaaatgtggcatatatacaccatggattactatgcagccatgaaggatgagttaatgtcctttgctgggacatggatgaagctggcaaccatcattctcagcaaactaacacaagaacagaatgccaaacactgcatgttctcactcataagtgggagttgaataatgagaacacatggacgcagggaggggaacatcacaaaccagagcctgtctgggggtggggggctaggggatgcatagcattaggagaaatatctaatgtagatgacgggttgatgggtaaagcaaaccaccatggcacgtgtatacctatgtaacaaactcgcacgttctcaacatgtaccccagaacttaaagtataataataaaaaaaagaattggcttctgtgtctatatttgtagttcatagatttttaccctctttatgtggccagctgctgcttcttagaaacattcttagtgcctgcacttaccatttaggacctctcaacttcagacctccaatagctccttggcccatgagccttcctagtttcccagtagaactgggtctcagccctgagtcctttgcagtacaaataccttttgtttacagaaggcctctcctsggacagcaaatctccttcactcatgccttgttctactcttttttcccatcaggctgtgtgacaaaaaaaagtacacatttctccaaatgcttcatttgctcagcacgtggaatataaagaataaggagcctaaygtataaaagtgatcattggctgtaacaattcaacttctgcagtcttaccctcatatggaacttgaatttccatttaatgtgccaggtttctaggaaaattgaaagtgtttaaacatttgtgaatagcagtaataagaaatgtatttggccccaaagagacaactcctttaccagcatttaaaagttgtatagtcaatattacaaagaatgtgtttagcattcattaaaggcatctgaaccctaaaaaagatgccttttggattagataacatttgaataaagcattttctttcatatacatatatattatatatacatggtatatgtaaatattccactatgtgattatatacacttgtgtgttattaattgtatatataattatatataattaataagtgacacagaatgaaacaagagatgttgatgtcatttattgaccatamgttattcacagagagtcatggatagaagctttgcttaatacgtttctttgtattgatgttaaattcaaaacccatatgaagacaatcattgccaggtttctattttatcaatttattaaacttccactgtgttcatgtataacagcacccatgctaagggctatgggatctttctgagtttaaaacaacaacaaaaaggtttcttaactttttttcatccagtataagctacaaactatacaaacatcttaatggagataaagggttgtgattgggctctggaacttgaaaagttgtgtcttgtcttcattcctttccatctttgttgctaacattactttatagcatacagtctagtgatcatgtgcacaccttgtcttttcaacctctttcctctcctcctaagctctcaacccattacctttctcctctctctaccatatcccatccccatagtcatacctctgcatctcctcccacctctcctcttccccacttacccttattcctttcccagttctccctttctcttccctccccttcttatttacccctactctactctcacctgtctcacttccagttgtatttctctcacttaagcacttcccactgtatttctgtaccttatgtctgacttccttcacactctcaaatacgtggctcacaaagtatctatccgtataaacgtattttattcagtgagtcaatatcaccaggttccctagaggttctctagttctaatcaccactaatgcagaacaagaacgatgttgattctatctataggaaatgagcatttcttcatttaagaaaatgggcaataaaattagagctctctgtggcacccaggccttccttgccaggttaccagttatcaggcctatttcaggttttgtacttgattgccagtaattcatcattttggaatatatgttcttactctgctttgagttttaaatcccatgatmtactactactactactactactactactactactactactactaccactgatgtattttaatagtatttttgtgggttgtattcgttgtcctttttactgattgaaacctaactagtatgaaaaaagagctttatccccctttctagaaaaaaaaaatattaaacaggtacagattttgctgcaagataatatcttctttccttggttaagaaaacaatttatttttttttcatttctcttccaaatttttagctggaagttttcaaatgtgaggcaagtagttttataaaatgtgctggaggtatagctttgttttagcactttctcacccagtaagtgagaaaatataagttaagaataaacccatcatatttaaaaatgtctctcttctttcattccaaagaaatattttagtactgcrcaaaaacacaaacacacatttagttggggatggctgaataaaacttttctaccaaagagaaagaagaatggaatgaaaactgaaaaaccttgattatagtgtatttaagagaaaaatataatttttccttttaaaaaattctcaaagaatatgggtaaagctacatcatatgacttaataaagtagatttacagactcatcaaaaaccttggcataaagaatatattatcttaagaagaaagctttatgaagaagaaactgtactaaatgaagaaaaactaattaaactaattaacttactcctttactgaatttgaaagaaccatgtgccaggtcaagtcttgaccagtttaaagtagcagcctaatttactcatatttaattttattaaattttgtgggaacaacaacagggcagcttcctgaattttgttgttatttttcctggctattaggggtggttttaaaaatgtgattttccaatataattgggaaatttaaatagaataagagatgccatgtatattaattttataaaggaagaaatgttttacaaagaaaaataccaattttttaaggtcagagagttcatagatgttaacaatayacaaactggcacaatgaccatagcaaaatgaaattgaagtcaacacaaagttcccttgtgtgcatggtattttactgtggtacatggtaacctaagttccttagtccacaccccagcctgctttccattaaataagttcaatatttaatgctckgtctgcaaacctggacccacttttggtccctttctcacttgaattctctacataccaaagggtatttcaggaaacacacctcaaaagtcataacttccctgtaattccactgctatctgctctctctgaaccattggtgtctctcattggggttgtggcaagatgttcccaactgggccttttttggatccactgtaatcaggtcttctataattcaacagcaagggtcatttgaaaaacaaaaattataatatcactcctctgcttaaaacctctccattgctttccactgtacatacaagatccaaatgtgtctcatggcctaccaaggtctgcattatgtggcccctccatatatccttaaactaaccttgacttgtactccccacctttcaataagctcaagctaccaatggttcttttagattttgaatatgcgacaccctttctagcctcagggttctcacacatactgttccctctgcctgcagtaggcttcacatatatgtcagctctccttagaaagggttttcctcacttctatctaaattatttgccacaatttattctctgttataataattagtgttctgcataacatcaattataattggaaactaaatacctatttgcttacttgtatattgtctacctcttccaccagactgttctctgagcacaggactttatgcctattttgttcccatctcctacaggctagcatagtgtttggcacagtatgctgtcaacaaacactggcagaatgaatacatgcccctgtgtaaggaagaaaggagcagtacccctcctcttccctaggaccagtgaggctgtttataatgaactagtctaaagcatgcacacatgggatgcttcatgtaagtctgaatttaattttggatttaaattcatacattaatgcttcaggttatgcttaaatttatcgttattcatgagggcatgcctgggtcgggaccactacataatttgtgggactcttccaaaataaaaatgcaggttgcttgttccaaaagcaagaaaaaagagtgaagttaaaaataacaaaatatggatgaaacattttcctttagaaatgtcttaaggataaagccctttcctttaaaatgtcttatatcttatgaaatgtaataggagtaatggtaatacatgcataacaacataaagttgaaacttgcaaaaacatttttagtgtcaactttttatataatataatactttgttaatgattcatcttgactgatcttaagattgttctggtttccttttctgaaaattcatttatcagtcaccaaaatttatacttttaacaacttcattttttattaatataattgaaagcaacaccagattctcttggtaaatgtaagatcacaagtaatttttatgtttaaatatctaggtgaatctctctgattatggaatttttactggagcagctaggtgtattttatagactatgtcaccttttagaacatctagagttgttgattagtctcatgagcaatttttctaaaaagatttaactcttcatgcaaattggtttcataagtctgaatttaattttggatttaaattcatataataacattttaatgtttcttttgacatctgtaacttatgaaagttgtatgagaaactcaaattggcttcatggcctgcatgtaattcaaaaggactggttatgcattctatggtgtatcttccaactatataaaaagttacttgtaaaatgaattttaaaattgtattttgaagcatcatatgaatgtagcattttttcccactgaatgtaacaatttttaaatataatttctttctctttagcctgtgatatttgcttcacaatgttgaagcagctttcaaaaacagaatctaaacactttgagtaattctaattctgatatatgctctgctgtaatatccatatctacccttatattttgtagtaatttactcacaaaatctagtccctaagggccaacagtttttgtcctagacctcacactagctagttccatttgagcaaatgacacaagtaagactttgagaatgaatggtcaagttccctcctatgaagcgcactggtgctctcttaggcaacgctcctatggtgctcctctgggcagtggccctcttttgttccaggctgtggccatctctggtggctggtgctgctattgtaggtcccattggaacaatccccttccccaggacttccccaggcaaaggcaggcacacacaggcacacaggcagctgggccaactgttctgggtgtcccctgcctgctgcctgctgtcccccatgcctgtgggcttcagcctgtgtgtgtctattgcctactggcatctctcttgctcatgttgcatgctccactgtcccaaagactttacttagaaaaaacaagatcaaagataaaattattaagaatttcaagctggcaatagcagagcattcaaccaagaaagggttaactgcacagctccctggcccataaagctagccctgctgggtctcttttggtagaattgtggatcttgtcctggaaagtgtggtgacactggcaactgagagtggatctcccctttattaactaaagtccacagtttatattagggtttactctttgtgttatacattctatgggttttgacaaccgcayaatggatctgccattatagaatagtttcactgtcctaaaagtccctgttctccacctatttatccttccctccmtacagccttcattgtttttttccattctcattgtcagtctctaatacaaaggtattctaatcccagaacaaaagacaaaccattaaaccaagtattttgagtagtgagggttagcagagaatggagagggtggagaagggcatgtttttatgaagaaatcagttcctgttttggtttccaagtcagaaaatttgagatatgttatacacattatttgtgtggacaccacacataactgtatatggagcgaagcgtgaactgtgtttacaccagtaatagccaaaaagaattataataataaaaataacagggtttttttaatttttttttattttttgagacatagtttcactcttcttgcccaggctggagtgcagtggtgcaatcttggcccactgcaacttctgccttccaagttcaagccattctcctgcctcagcctcccgaatagctgggattacaggcacccgccaccacgaccagctaatttttgtatttctagtagaaatggggtttcaccatgttggtcaggctgttctggaactcctgatctcaggtgatccacccgccttggcctcccaaagtgctgggaccacaggtgtgagccactgggccctgccaaaataagagtttttaaatcataaagaccacatacgctatctttcagattgtctggctggtacaggtgcttaataaatgtttgttgagttaataaacttatgcataagattccagataatttaacctcactatgaaattgcatttaacacatatatagtctgaaacaaaattattcaaaaaaaaataattcattagttttattttcatgtataagcatactttcttacaaaaaatctgtctccattctttaccttttgcacacacatctattcacacacagacacacacaaacacacacacttctgtacttaataagtaggcttgactttgtcttttcccttttatttcaatgattttatcaaattgttgaagactctatttcatattttctcttagaattattccttcaattttatataaagagggcaaatgagaacaaagccaaaattaaatctagttttgctttgattgtagttctttttcaagagtttagtgtgcattatgctgatgaggcttggtaaacccaattccaatttaagcaaacacaattgttgaatgaatactttggcataaagttgctcctttgtaggccaaatatctagcatgtaattttatctcactattgtattacaatagaagtatcatagctctggaaataagcttaaatctttgtgtctataaggagtcctcttcagggaaaaaaaaatatatttcaaaagttggtacttatttaatctcaaagggataagcagttgatatattactgaaaagtataaaaggtatctgaccataaattaccaaattgtttccataaaaacgtattgtatttttgcatatatttgtatttacaaaacaaatagttaaataacatttatataatctaaaatgagcaggtattctatgtagacctatataggttgagattttaaaatgtttaatagtaatgtttattaaaatatttaacaataattaaaggctatttttatttttaaagtggtaattacaacttattttctttttttaaccatagtattttaatttttaactggagttttactttatgatctcaaggtagtccagagtgggaaatagttctgaaacaatgctaatttgttttattcgctcttttgtcaatagcaaaactgaaagcttatttctcccaaagtggttaataagatagccttccttactcacactttgttatttcctgtttattggccaaaaacagattgcttttaccacagagaattatctacaatgattccaaagagaaatattggattggcagtctggggaaatgtgtgcttttctgctatttttttttttcttttcagttcgtgtgtgtgtgtttgcttcatatagctcagagtatgctatccaggtcacagacttttcatgtgtgaattgaaatgggatgagcttgaggaaacacactaataagaaagctcatttttattttattattttaaaaatgccttcctgagagaagattggatagtgcagagattaggtgagtagtcttttaattcctgagatctgtacctctgacccagctcacagagataataaattttttaaaaccgtttttgctcctgataaaattactgaattaagtttgaaaataaagaacccacagagctcgcttctagtctaattgacaattgctgtttcccgaaccactgmctttgtgcctatcttaccctaccacagaaagtgttctttttggctcccccagtaggttatactgtgaagtctttccattgcagtttgaattccctcatcttccaaaatacatctgatttctcttattttctttttcaccaaaatgtatattcaggtcttcaatgatctggccaagtattggtttccatttctaccttcctactcattttactcagttttgctatcatcatctggattaggtatacaagttccatagctcccgatttcaccaaagatgtggttcaatattttcattaagcaaaatttggatgttttatattcagttatgagctgttcgagagcaatatgtatttcagccctctttgccttcactcgtatttaggagaattttaagaacctagttagtaaatgctgaataaatatttgttgaaaaaataaagatatgaattaatgctctataagtaataacttggagatagttggttggggggggttggagatgtgattatctttcattaatttgatttaaaagagaattatttagtccagtaggtagagtatggagggtaagtcaatacccaaaatatctatgtagatttgattatttatttactcccaacagtgttaacaaaggatttgaggagtcttagatgacgagatagatgagcttgctaggagaaacttgcaaatagatacagcattcaggctcaggctcagacgcagtaacaaagagatgtttggataatactacaacattccaagtactaaaaggtaaatacttgcttgaagagataattaaagagactgaaaaacatctaatgaagagagaaaactaataatatttgaagacatgaaacttaaaatgtgtcagtaacaaaatgatcaatattggttgaaggaaataataaatttatctctagcctttgtgttaaattcttgagctatctatatcattttagatgtataagtaagatataaataattttgagtgctctttacataatctcttgtwtgcaaaaattaacattatctrtctatttatttatttrttttagagacagggtctcattctgtcaccgaggctgaagtacagtggtgtaatcacagcttactgcagccttggagtcctgggctcaagtgatcctccacctcagcctcctgagtagctgggactacaggtccatgccaycatgctcagctaatttaatatttttttttagagacagagaattgctgtggtgcccaggctgctctggaactcttggcctcaagcaatcctcctgcctcagcttcccaaagtttagggattacaggtgtgagccacctcgcttggcctgcagatttaacattttgagtgycatggatctagatattcctgtaatctatatttgaaataagttcattgctttcagatggagttatgaccttttaaagcaacattctgtgttgagtgcaatttacctagtattatctgatctcagcataaaagtctttactgcagtaaactgacatgggccacccagtccagatatctaccacaagcttaraagtattttcccttttttaaatagagattttattaagaaaagtaaggagttagtttagcatgacacaacctatgttgtgacgagatctgtccacattttaatactcagctcttatgagcagatctctcaaaacaaccatgatacaggctgttatgacatcaatcctggtgcctttcagaggagccctgatgtgccaagactctttttctctatttttatctggattcttcctctcaggttgtcatgtgttctgtatattgttcttttcctgtgctatttctggccacttacaatttatgtgaaactttgtacttttaatcagggttcttactcccatgcttggctcatgaactttattcaaagttcattttaactgtatctattttatcaatttgattgctgatgaaagtttattcctccagtgtgttctgtaggatgcctattgccatttatttgctatttctggaataatttctgtgtgtatatgtgtgtatatatcctgagtaccttattgtcctgaattgctatgctataatgtcgaaggtagaaaagggagttatttttttactttttatcctaaacaaaagtcacaagaaactccagaatgtttctttaataraaatacggaatcactattaaacagaaactcagttgtcatggcatgttccatgttaagcctttaaatacggtttgacaaaggaccttgctatttaattatttcatgtcctttgttgtttaggatgtactgacccaacaattttaataggtatcagtgatcacctgaatggcagctaccccaagctataggcatggtgacttggaaacattgatcctctctataattcgaatcaactttgattaatggaagtgctgtaatatgatgtaggaacagaggcacaagatgttctgaaaaaggtggactgtataccacatggacttaaaaatagtatacaattgtagaggagaacaaaggaaaaggagcacaaatgtcaacttaagtaaacagatggcagggaaaggatagtggtaggaaaaatatgcaaaaggaagggaaactaagtattaattaacccattggataaaatattctttaactctgggagagataaaatgcttatgacaggactgtcttcataaataccaaraatattgctgcttaggaagaagactcttgctctgtgttctttgttttctgagacaagacaaccctgaatatgttttaagtgaataaattaaattgttaagatatgcttctggattttcaattatcttaggagacactagtaatccgggaagagtatttctttaccacctgtagttaatataatgagatctcatatctttccatgttgcctgcaaaagggcagcttcctgtttgacaacctaacttggttttgctgagagaaaatcatacaggtatgtacgtgtatttatctatctctatctctgtatctatctttttcacagagaaaaaggtttcttaggtagtcctgagtgttttcatagctgttttttgtttttgaacaatacacctataattacacaccttttaatataaaaggtcatgacaccttcaccaccaccatttaaaataaaatattttggtgtggatgatgaagtctataaactattagctttaaatgttttaaatttattctattcaatattttctatgtttatgcctgaatacagccacaggcattgataacattctaaaagttacttgaaatttgttgggataatatgagaaacaaaggatttgagtggagtggacatatctgtcttgcactgcgatttgtgcagctctctgctttcagtctgaactgatttgatctgaacttgttcaagcaacagcactcttggagagttaggctttgttggcaatcatgtgactcagggctgtgaaggtcctcagctgttttcctagagtgttatgtgctaactatacacttttaaaaaatggagctgctattgtatagaagactcagaggggtaacttttgacacttgtaacacaagtccaaactatgatttctacactttgtgtcatttcagtttatctaagctctaatcaaaacagcacccagtgttccttgcccaaaggcaaatcatcttcttgacagtcccatttccatttacctgttatcatccttctgtctgctaaccttataattatgtttgatacttcctcctccctcaccctgaaaatccatcagttgccaacttttgtagtttctctctctttcgtgtctgttctacccactttgtctgttttctgtgctcaagaggagaaccttattatgttttggcctggcctactctggcccatttaacttatccttctaacaatagccaaataaaatttcctaaaatccagttcatgctttattacttcgcaattcaaagaactcaaaggtttcccttaagtctcagcaatataatcccaaccttactttattatagtattactagttttctacacattctacttcatctttactatagtattactagttttctgtgcttcaagccatttacaagtctgattatcaaaatgtggtcagaatcctgtatttcaaatcttgtttcccttgcaggtaaaatggtattgctccctcaaagtagctctccttcccatcgtgatcttaaccacaaacaaatttctcaacctattatgtatagcctaaaatgccatawacctagagtgccttttcgtgccacccatggtcaagctccagccctgatctgggaccttttaatcctcagttcatttaattatatttctctttggcactttcctcattctttccttactatattatattttattctaaatttgcttacccccaggctctgtttcttctctgggcagaaagcaaattcctcacagaaatcctttaatatcatgcagtcatttgacatgcagtaggattttaaatacatttttgttctattcaataactgatgcttctataaacttatattttattcttgccagaaatgtttatgggacagggtatgtcccataattttcttttgctataaattatcagtttcttgtcactcttattcatagaaaaagataaatcacttaaattcagaacctattatttcccattgatttaatttagcttatacagaaattctatcagtgctacaaaatagcaaactctcatatctgtacttgtaaaattacttttaaataactttaaatgaaaaaatcaatgaaaataatatagtatttccacaaaagggaaatggtgataatcgctcatttcaaagaggaaaacatttaggaatctcattttctcatggtatttatggtagaaataagctgaatgtaaatcataaaattttggtcagatactttttttttgaaatactataatattacagttttctttacattttggggggtaaaattaacctgttattttaatgtataatacttataacaccttgaggtttaaattttagaaattaaaaaactgggacccagaaatattaamtgagcagtccaaattacagaaataaaaatactagaagtaggacttaaaatcctgatctcctatttaaacaatgtatgcttattcgatgtcactctgagacttttcgtgaaaaccaaattctcrggtggagccaagatggctgaataggaacagctcccstctacagctcccagygtgagcgacgcagaagccgggtgatttctgcatctccatctgaggtaccgggttcatctcactagggagtgccagacagtgggcgcaggacagtgggtgcgtacaccgtgcgcgaaccaaagcagggcaaggcattgcctcactcrggaagtgcaaggggtcagggagttccctttcctagtcaaagaaaggggtgacggatggcacctggaaaactgggtcactcccaccctaatactgygcctttccaactggcttaaaaaatggcacaccaggagattatatcctgcacctgcctcagagggtcctacrcccacggagtctcgctgattgctagcacagcagtctgagatcaaactgcaaggtggcagtgaggctgggggaggggtgtctgccattgcccaggcttgattaggttaacaaagcagccctgaaactcaaactgggtgsagcacaccacagctcaaggacgcctgcctgcctctaggctccacctctgggggcagggcacagacaaacaaagggcagcagtaacctttgcagacttaaatgtccctgtctgacagctttgaagagagtagtggttctcccagcacgcagctggagatctgagaacaggcagactgcctcctcaagtgggtccctgaccccccagcagcctaactgggaggcaccccccagtaggggcagactgacacctcacgaggccaggtactcctctgagacaaaacttccagaggaacgatcaggcaacagcatttgcggatcaccaatatccgctgttctatagccactgctgttctgcagcgaccactgctgatacccaggcaaaaagggtctggagtggacctctagcaaactccaacagacatgcagctgaaggtcttttctgttagaaggaaaactaacaaacagaaaggacaaccacgccaaaaacccatctgtacgtcaccatcatcaaagaccaaaacagataaaaacaaaaagatggggaaaaaacagagcagaaaaactggaaactctaaaaagcagagtgcctctcctcctccaaaggaatgcagctccccaccagcaaaagaacaaagctggaaggagaatgactttgatgagttgagagaagaaggcttcagatgaccaaaatactccaagctagaggaggaaattcaaaccaatggcaaagaagttacaaactttgaaaaaaaattagacaaatggatacctagaataaccaatgcagagaagtccttaaaggagctgatggagctgaaagccaaggcttgagaactacgtgaagaatgcagaagcctcaggagccgacgcaatcaactggagaaagggtatcagtgatggaagatgaaacgaatgaaatgaagcgagaagggaagtttagagaaaaaagaataaaaagaaacgaacaaagcctccaagaaatatgggactacatgaaaagaccaaatcgacatctgatgggtatacctgaaagtgacggagagaacggaaccaagttggaaaacactctgcaggataatatccaggagaacttccccaatctagcaaggcaggccaacattcaaattcaggaaatacagagaaccccacaaaaatactcctccagaagagcaactccaagacacataattgtcagattcaccaaagttgaaatgaaggaaaaaatgttaagggcagccagagagaaaggtcgggttacccacaaagggaagcccatcagactaacagctgaactctyggcagaaactctacaagccagaagagagtgggaccaatattcaacattcttaaagaaaagaattttcaacccagaatttcatatccagccaaactaagcttcataagtgaaggagaaataaaatmctttacagacaagcaaatgctgagagattttgtcaccaccaggcctgccctaaaagagctcctgaaggaagcactaaacatggaaaggaacaatcggtaccagccagtgcaaaaacatgccaaaaggtaaagaccgtcaaggctaggaagaaactacatcaactaacgagcaaaataaccagctaacatcataatgacaggatcaaattcacacataacaatattaactttaaatgtaaatgggctaaatgctccaattaaaagacacagactggcaaattggataaacagtcaagaccaatcactgcgctgtattcaggaaacccatctcacacgcagagacaaacataggctcaaaataaagggatggaggaagatctaccaagcaaatggaaaacaaaaagaggcaggggttgcaatcctagtctctgataaaacagactttaaaccaacaaagatcaaaagagacaaagccattacataatggtaaaaggatcaattcaacaagagctaatgatcctaaatatatatgcacccaatacaggagcacccagattcataaagcaagtccttagaaacttacaaagagacttagactcccacrcaataataatgggagactttaacaccccactgtcaacattagacagatcaacgagacagaaagttaacaaggatatccaggaattgaactcagctctgcaccaagcagacctaatagacatctacagaactctccaccccaaatcaacagaatatacattcttttcagcaccacaccacacctattccaaaattgaccacatacttggaagtaaagctctcctcagcaaatgtaaaagaacagaaattataacaaactgtctctcagaccacagtgcaatcaaactagaactcaggattaagaaactcactcaaaactgctcaactacatggaaactgaacaacatgctcctgaatgactactgggaacataacaaaatgaaggcagaaataaagatgttctttgaaaccaacaagaacaaagacacaacataccagaatctctgggacacattaaaagcagtgtgtagagggaaatttaaagcgctaaatgcccacaagagaaagaaggaaagatcccaaattgacaccctaacatcacaactaaaagaactagaaaagcaagagcaaacacattcaaaagctagcagaaggcaagaaataactaaaatcagagcagaactgaaggaaacagagacacaaaaaacccttcagagattaatgaatccaggagctggttttttgaagagatcaacaaaattgatagactgctagcaagactactgaagaagaaaagagacaagaatcaaatagatgcaataaaaaatgataaaggggatatcatcacggatcccacagaaatacaaactgccacgtgagcaaacagctcggttctgtgcagagataaagtcccccaaatatggtgaaggccaccaagcatggattattgggattgtggagaagggcaactgcacagccagaatcatagacaaacccaggatcatcgaggtcrcaccacaagtggccactcaaaatgcgaatccctcacctggggccacctcttaatctagacagaaatagctgtttggttttgtttttaaatagatctatgtcccttatcaattcaattaaagagtataaacaacaacaacaacaacaaaagaaatacaaactaccatcagagaatactataaacacctctacgcaaataaactacaaaatatagaggaaatggataaattccttgttacgtacaccctcccaagactaaaccaggaagaagttgaatctctgaatagaacaataacaggctctgaaattgtggcaataatcaatagcttaccaaccaaaaaaaggcctggaccagatggattcacagcggaattctgccagaggtacaaggaggagatggtaccattccttctgaaactattccaatcaatagaaaaagaaggaatcctccctaactcattttaggaggccagcatcatcctgatacaaacgcctggcagtgacacaaccaaaagaggaattttagaccaataaccttgatgaacattgatgcaaaaatcctcaataaaatactggcaaacccaatccagcagcacatcaaaaagcttatccaccatgatcaagtgggcttcatccctgggatgcaaggctggttcaacatatgcaaatcaataaatgtaatccagtatataaacagaaccaaagacaaaaaccacatgattatctgaatagatgcagaaaaggcctttgacaaaattcaacaacccttcatgctaaaaactctcaatacattaggtattgatgggatgtatctcaaaataataagagctatctatgacaaacccacagccaatatcatactgaatgggcaaaaactggaagcattccctttgaaaactggcacaagacagggatgccctctctcaccacacctattcaacatagtgttggaagttctggccagggcaattaggcaggagaaggaaataaagggtattcaattaggaaaagaggaagtcaaattgtccctgtttgcagatgacatgattgtatatctagaaaaccccattgtctcagcccaaaatctccttaagctgataagcaacttcagcaaagtctcaggatataaaatcaatatacaaaaatcacaagcattcttatacaccaataagagacaaacagagagccaaatcgtgagtgaactaccattcacaattgcttcagtgagaataaaatacctaggaatccaacttacaagggatgtgaaggaactcttcaaggagaactacaaaccactgctcaatgaaataaaacaggatacaaacaaatggaagaacattccatgctcatgggtaggaagaatcaatattgtgaaaatggccatactgcccaagggaatttatagattcaatgccatccccatcaagctaccaatgactttcttcacagaattggaaaaaactactttaaagttcatatggaaccaaaaaagagcccacattgccaagtcaatcctaagccaaaagaacaaagctggaggtatcacgctacctgacttcaaactatactacaaggctacagtaaccaaaacagcatggtactggtaccaaaacagagatatagatcaacggaacagaacagagccctcagaaataatgctgtgtatctacaaccatctgatctttgacaaacctgacaaaaacaagcaatgggaaaaggattccctatttaataaatggtgctgggaaaactggctagccatatgtagaaagctgaaactggatcccttccttacaccttatacaaaaatcaattcaagatggattaaagacttacacattagacctaaaaccataaaaaccctagaaggaaacctaggcaataccattcaggacataggcatgggcaaggacttcaagtctaaaacaccaaaagcaatggcaacaaaagccaaaattgacaaatgggatctaattaaactaaagaacttctgcacagcaaaagaaactaccatcagagtgaacaggcaacctacagaatgggagaaaattttcgcaacctactcatctgacaaaaggctaatatccagaatctacaatgaactcaaacaaatttacaagaaaaaaacacccaaccacatcaaaaagtgggtgaaggatatgaacagacacttctaaaaagaagacatttattcagccaaaaaacacatgagaaaatgctcatcatcactggccatcagagaaatgcaaattaaaaccacaatgagataccatcttacaccagttagaatggtgatcattcaaaagtcaggaaacaacaggtgctggagaggatgtggagaaataggaacacttttacactgttggtgggactataaactagttcaaccattgtggaagtcagtgtggggattcctcaaggatctagaactagaaataccatttgacccagccatcccattaccgggtatatacccaaaggattataaatcatgctgctataaagacacatgcacatgtatgtttattgtggcactatttgcaatagcaaagacttggaaccaacccaaatgtccaacaatgatagactggattaagaaaatgtggcacatatacaccatggaatactatgcagccataaaaaatgatgagttcatgtcctttgtagggacatggatgaaactggaaaccatcattctcagcaaactatcgcaaggacaaaaaaccaaacaccacgtgttctcactcataggtgggaattgaacaatgagaacacatggacacaggcaggggaacatcacactccagggacagttgcgggattgggggagggggaagggatagcattaggagatatacctaatgttaaatgacaagttaatgggtgcagcacaccaacatggcacttatatacatatgtaacaaacgtgcacattgtgcacatgtaccctaaacttaaagtataataataataaaatttaaaaaaaaaggaaaactaaattatcaagaagtaataggaattattgacctaaaccctctcaattttctattggaaagtacttttgtttcagataaatctagctgtctaatatttattgtcgaataatgtattagttagggttctctagagggacagacctaataggagatatgtatagcaaagtttattaaatattaactcacatgatcacaacatcccatgataggctgtctgcaagctgagggccaaagagagccagtcttaatccaaaaactgaagaacttagactctgatgttcgggggcaggaagcatccagcacaggagaaagatgtgggctgggaggctaggccagtctaatttcttcacatttttctgcctgctttatattctagctacgctagcagcttattagatggtgcccactcagactaagagtgggtctgcctttcccagcccactgattcaaatgttaatctcctttggcaacaccctcacagacacacccaagatcaatactttgcatccttcaatccaatcaagttgacactcagtattaaccatcacaagtccaccctttgtcaacttgaatccatacacatctcctgagatcatacataatctttaaataaagaaaattataaggtcataattacgcttaacataatacaactatccttcgtacaaacggaaacacaccaattcccaacccaaatatgattacataaagttaaatgctgatgtgaagtcaataaatcttaggttacctgataaaggaaaaaggaaataaaatgaacttattttcttagttcaagtgtatacatgcacaaacatatttctaacaaaagagggaggaaatactcatgacaattacagtccttgtttctgcagcaggtcatgtggtcatagctggtattgatgactaccttcttctactacccattctgtattccctttgccttcagcaagcacctcagcaggttgtggtatttttcctggtggagagaccgaaatcttcattgctgaagggtctgggcaatttgtagtcctgcctgggttgggttgttgtagtttcccattgatcttaatcacagggcatggtaatactaagagacacccagatggatctctgtattccatgtataatcttccttacctctgttgtggagtagtagactgatttcatcttgatagtcctattcaatccccctagccaacactgtatctcccttcttagcctgttgacttaaaggtatgaggagcccaaagtgtccaggtggcaatcttaacttctagtttaatggtaacgtgtttactggtggcagcattcctccctctggaactaagacctctaggccagcagaacataatttcacagggacaggaagcaaaaaatttgctaatgcaccactaggggtgatggtgagtgctgccacttctacttccaccccttgattcctggacctgtgaaccctggctatcggaaaaacagtaccatatattcgatgctgatttagtgcatatacgatcttctggagaagtttgccccagtcctgcaaagtattgtcacctagttggcattgtaactgtgacttcaaaaggccattctagtgttctaccattccagctgcttcagtatgatggggaacatggtaaggccagtgaattccaagagcatgagcccactgctgcacttttttagctgtaaagtcagtgccttggtcagaggcaatgctgtgtggtataccatgatggtggatgaggcatactgtgagtccacaaatggtagtcttggcagaagcattacgtgtaggataggcaaactcatatctggagtaagtgtctattccagtgaggagaaacctctgccctttccatgatggaaaaggtccaatataatctacctgccactaggtagctgcctgatcaccccaaagaatggtgccatatcaagggttcaatgttcgtttctgctgctggcaaattgggcactcagcagtggccatagccaggtcagccttggtgagtggaaatccatgttgctgagcccacaagtaacctccatccctgccaccatggccactttgttcatgggcccattgggcgatgacggggtggctggggaaacaggctgagtcgtgtccacagaacgagtcatcctctccacttcattattaaaatcctcttctgaggtcacccactggtaagcactcacatgggatacaagtatctttacagtttttgaccagtcaaagaggtccatccacatacctcttccccacatttctttgtcaccaattttccaatcatgcttcttccaagtccttgacttcccagccaaaccattggctacagcaaatgaatcagtatataattgtaaatctgaccatttttccttccatgcaacgtgcacgaccaggtgcattgattgaatttctgcctactggggagattttccttcacagctgtccttcaggggtgtcctagaaaagggctgtagtactgcagctgtccactttcgggtggtgcctgcatatcgtgcagaaccctctgtgaaccagggcctagtcttctcttcctctgtcaacttatcatagggaattccccatgaggccatcagtgcaggctggggtggcaggggtggagtcacttccatttgagccacttcctcatgtaacttacatgggcatttgagccacctcctcatgtaatttacttgtgctttcagcacctgcttgagcccagtcacatatataccacttccatgtgatcatggaatgttgctgtgcacacctcactttatggctagatggatcagaaagcacccggttcatgataggcagttcaggtcacatggtgacttgatgacccatagttaaacgttcagtttccaccaaaccccagtaacaggccaagagctgtctctcaaagggaaagtagttatccacagaagatggcagggccttgctccaaaattcttgaggcctctgctgtgattcactgatgagggcctgccaaaggctccaaacagcatccctatctgccactgacacctcaagcaccattggatctgtt

SEQ ID NO: 94642 - DNA, 83030 bp, Homo sapiens
agcaattctcctgctcagcctcccaagtagctgggattacagacgcgtgccaccacgccgggctaatttttgtatttttagtagagatggggtttcactatgttggccaggctggtttcgaactcctgacctcgtgatcccccgcctcggcctcccaaagtactgggattacaggcgtgagccaccacgcccggcaagagagaattctaaaccatgaggatgtaactgaggattacaggaagtgttaccaagttgagatggctggaatagagaggaaagaaaatcctcccacaatgcaatttgttttttgaaatgctgcaaactcacttgacagctgtgatccagaatggctacctgtgccgggtgcagtgactcacacctgtaatcccaacactttgggaggctgaggtgggctgatcacttgaggttaggagttcgagaccagcctagccaacatgatgaaaccccatctctgccaaaaaaaaaaaaaaattaactgggcgtggtggtgtgcacctgtggtcccagctactctgaggcaggagaattgcttgaacccgggaggggaggttgcagtgagccaggattgcaccactgcactccagcctgagttatggagtgagaccctgtctcaaaaaaaaacaaaacaaaaaacaaaacaaaaaacaaaatggctacctgaatagtcactgttttcccagcagagatctggcaaatgagttagcacaagaacagccttaaggtatcagctaccattacccaagaaggtagtggctgggcttgtggattatctagccaaatgcttcctttccttggggctctagcaagctttgtttgaaccacagaaaatggtaaaaaagaggtaataaaattgtaatgagttaactgacttcttagcagcctcttcagtaaagatttggtggggacatgagactacaaagatgctgtggatcattttctttgtcctttcaattccccatcaccttccatgcctatctgctaagaaaacattttcctggcagggcgcagtggctcacgcctgtaatcccagcactttgggaggctgaggcgggcggataacctgaggtcggagttcaagaccagcctggccaacagggtgaaaccccatctctactaaaaatacaaaaaattagctaggtgtggtggtgggcacctgtaatcccagctacttgggaggctgaggaaggagaatcacttgaactcaggaggcagaagatgcagtgatctgagatcgcgccattgcactccagcctgggcaacgagaccgaaactccatttcaaaaaaaaaaaaagaaaacatttttcccacatattctcttaagtgtatccacaagcatttcttttataaggaaaagctttgacccaatccacaagattaatcaaatgtaaaacatctgagaattctctaacatacaacagacaaaagtattattattttgaagcttaaaatacccactttccttcaggacaagagactatgctaaagcaaagcaaaaaaaaaaaaaaaaaaattgactaacccccaagaaaagagggttttcttactttgtcttatataggtgcataataccatgaactatttcaactgatggatttccactgaagaatgaaatctggtctggaagctgtttggacggagaatctggggcagcgtttatgcattccttactgtgatctttacttctttgcgcagtgggggaggcttctgaagacttcctttcttccactgtagtttttagttcatctttcaccagttaaaaaatagcagattataaatggataggacatatgctgaaggatttgaactagattaaaatttcaagtcagaggaataaactttgatagagtaattacaatgtaatgcattaacagctattatttgtagaatagctgagtttatgagggcatcatactttaaagctctctttgctccataaaaatctcattaacaccctcagaaacttaaggatggctattacatttggcaataccataatgcaagcaggtatcttctatcacgaaatcctaactgggacaaacattcagggctactaaggtggaaatccaaacctaccagttctgaccacctccatgttggagatgtagtactatctacacatccacttccgcagataaaatgagctggctggccgggtgcagtggctcatgcctgtaatcccagcactttgggaggtcaagaggttgagaccatcctggctcacatggtgaaaccctgtctctaccaaaaatacaaaaattagctgggtgtagtagygtgcacctgtagtcccagctacttgggaggctgagagaggaaggagaattgcttgaaaccaggaggtggagttgcagtaagccgagatcatgccactgcactcccacctggggacaaagtgagactgtctcaaaaaaaaaaaaaaaaaaaagaaaagaaagaaagaaaaaatgagctggcagagcaggggaaggcacgacatgtttatttggacacattaatgatctgccactgaactaggtggtaagaaattctccctggtagccgggtgtggtggctcacacctgtaattccagcactttgggaggccgaggcaggtggatcacttgagaccaggagtatgagaccagcctggctaacatggagaaaccttgtctctactgaaaatacaaaaattacccaggcgtggtagagggcatctgtaatcccagctacttgggaggctgaggcaggaagactgcttcagcccaggaggctgaggttgtaatgacccgacattgcaccactgcactctagcctgggcaacagagaccctgcctcaaaaaaaaaagtcccccccgtcactgaactgaattgtcaactccaactgttaggattaatttggaagaaatatttggaaacactaacatgtggcttaacagtgtcatataaagcacacacgtagtgaaagacaaaagtatgctagatgttgaaattgtaggctcatcaaacaccgtgtataaaataggcaaccagtgttcacattacaaaagagagtccagggttttagaaagcatacctgggttggacttcatggtctcaatgatcacatctgtcatttctcgacggccgagatgctgatggataatcgctactttctctcctggtgacttgccttctaaacaggctacagctgaggctagtgtcgtcttttttatctcctcatcagacatttccccggctaaagaacacatgaatgattaatacaaggtaataaaacaagctcctctctgttctctattcctctatcattaggttttccttttctttctcctgccttccgccaagatgataagaagcctttgtagtatccatctcactcaactctgggaccactgcagtacacagcaaagagtcaataagcagccaggacaatatactcagaaatgcagggctgttctactgaaatcatgcactttatttttattttttgagacagagtctcactctgtcacccaggctggagtgcagtggtgtgatcttggctcactgcaacctccacctcccaggttcaagtgattctcctgccccagcctcccgagtagctgggattacaggcacgtgccaccacgcccagctaatttttgtactttcagtagagatggggcttcaccatgttggacaggctggtctcgaactcctggcctcaaagtgatccacccgccttgacctcccaaagcgctggaattacaggtttgagccactgcgcctggcccaaaatcatgcactttaaagcaaatcgccaaagagggagccttagagaagatgcaacagtgatcatgcccagatgagctaacattttagtaacacctgataaaatgaaattgtgttcagcccaaaatgaagctatcaagtccattaaaaaaacaaaatttcaaaaacttgtaggggtagtcttaaacatcctggcttatgctcatgccatgaaccaagccatgaacatctgtgattactgtcttaaatcaatgaaacacatgaaaagggaaacggaatttggagacttaactgaaatatccctaatacatgctctgtcagggcagggacaaggcctgttttgcccaccactgtattcccagcccttataccacagtgccgagcacacagaggaagccctctaaatgtttgatgaataaatgactacatgactgacccatgcagatgtctatatgcggctaatatcaatttagctgactctcagaactcagaagccacttttagcctttggaaaggtgctcataagctataaagtcatattcaatctttaatttgcagcttcaaaggtcacgtcctcaggaagttcccaatgacaccatccctacctgcccccatccctctctccaaaccaaacacatcttcttgtaatactttcccaaattgtttctcctttccttcacagcacttaccacagttgtaattctacacatattctgcacttatttaattcatctgtttcctccatgatactgctggtgccattaaaacagagacgctgtctgattcagcacacaaggaaggctccagcagatatgagcataagttttttttttgtttttttttttgaaatggactttatctcttgtcgcccaggctggagtgcagtgccacaatcttggctcaccgcaacctccacctcccgggttcaagcgattctcctgcctcagcctccccagtagctgggattacaggcacctgtcaccacgcccagctaatttttgtatttttagtacagacagggtttcaccatgttggccaggctggtcttgaactctcaacctcaggtgacccgcccgcctcggcctcccaaagtgtgaggattacaggcgtgagccaccgcgcccggccaagtatttcttgaatgaatgttagttaattatctgaggaccaaggaacagagccagagctgcattccccactaaggagcttcctcacttgtgttaatggtgtaaaaagctcagactcaagtccagctcactgagttagaatcccagtttcacccattacagataaccttgggcaaatcaattaatcactaagcttcagtttcccaatgtgtaagaggtacatgtcacatccatctgcctcttagggctgttgcaaagataattaaagaatacaatacacaaaaggtgcttagtacagtgctgggatataggaagtgtccaaattttagttatgactatggttagggggcacttcaatggatatcgttccaaaagggaacaatttaattaacccagggaccgtccagcgttgctggggacccagtccctgcctttacgaagcccatagggaagcaagtgagacaaacacaccactcgactatctcgagagggagacgcgccaggtataaactaaatgccctcagacggcacagggagggaggttcggggcagggcttccctgagataacaaacgggaaggcctctcaaaggcggatgggaaagagagggatcccgattacctctccgtgtcttcctgggcaacagccctcgccgcgggcttttcccgggccagtgctttgggaagggaagccctccgggcccagacccggctacagggaatgcggcgaggccgcgggactcacccgcggcgctgaagccgaagccggcggggacaggcgagtgttccgcgagctccaatcggataacaaccagtgacacactcatagggcaggcgctggccggcgcgggccccggcgggctcaggcgaggctggaaggcgagccgagaggccgagcggcccggggccggcagcgccgccaccacctcaatgcagttgccgccgcctcagcagcagcagctcctcgaacagccctcggagccacaacaacctccacttccgcctcccggccgccgtcgctgacctgcggtttacgcatgcgcgcaggaccgcgcacagcgattgggcggcgtggcaggggtcacccactgctcttccggacgcaattttgaggaggtcggagcggaaggacgtcgtggagattgcttgcgctggggtgccacacttaggctgagctgcaggttttcgcacagtcgcgagttaacctctgcttgctccagaggcctcgtcctaatccacctcggctgacggcgcgggatccctggctccgcgaggtctccgaattgtccgagctatctgctatgcagaactttgccccttttgttgtgtttgactcctgtctctaaccctagtctggatggttttgtttctgtcccactttacagataggtacaacgaggctcagagaggtgaagttccttctaaggggccgtagagagtggagagtcgatcgctgttcagatagcgatctggctgggcgcggtggctcacgcctgtaatcccagcccagaggcttaggcgggcgaatcacctcaggtcagcagttcgagaccaacctggccaacatggtgaaacctcgtctctactgaacatacaaaaaattagccgggcttggtggcgcgcgtctgtagtccaagctacttgggaggctgagacaggagaatcgcttgaacccgggaggcggaggttgcagtgagtcgagatagtgctagtgcactcccgcctgggcaacaagagcgaaactccgtctcaaaaaaaagagagaaaagatggtgatctgctggttacgagcatagtgctgcagttagaccggggtcctcctccccaccctgtcacttcacaaatgtttactgagagtctagacacccttgggatgcttgagatacgttggcgtataagataaacacagttcctgtccgtactatgaggttgacctacatcagcagttgtgcagtcttgaactagtatagtcattgcataaagttggcatgatatcatgtcctcatgcagttgtgaggatgaaatggaattatgtatatggagataacattagcttttctgaggctcagcattctttccagtatgtcagagtggcttttgtatgtagatactgacacaatcaatgcatatgggacacatacatgacaggatgctactctaggtacattgtataatgatacatatgtaagtacatagtacattctagatgtgtgtgtgtgtggacatagtgcgttctagatgtgtgtgtatctggactatgacatgaccacaagatacatgcgtatatagatcttgtgactacatcctatgaaatacgtttccatatgccctgtttaaatcagggtttctcaactctgcactattaacattttgggtcctgattattcttttttgtttttggcaagggggcggggtgtcctgagcattgtagagtgtttagaaacatccctggcctgacccactagatgtcagtagcacctctccccaggtggtgacaaccaataatgtctctggacctttccagatgtctccttggggttagaaaacataaccctgttgaagaatcacagggttatgtgaaagtgcataaaccatacacacatactgtatgcataaaacctatgagacctcttgtgaacttttttagtatattactatagtagataacatttcaacatgtgccaggtactaatttgagtgtttcatataccttgtgtcatgcaatggtcacaacaactttatgaaactggtactatgtccctgttctacagaggagtaacctgaggcttggaggaagagtaactggctcaggatttcacaggtagtagtggcagagctggaactgaaattcaggcaatctgaatccagaacgaacattctttatctctttaccaaacaaacctttttttttttttgtattttgagacggagtctcactctgtcgcccaggctggagtgcagtggtgccatctcggctcactgcaacctcggcttcctgggttcaagcttcctgcctcagtctcccaagtagctgggactacaggcacacagcactgcacccagctgatttttgtatttttttttagagataggtttcaccatgttggtcagacttgtctcgaactcctgaccttgtgatccgcccacttcggcctcccaaagtgctgggatgacaggcgtgagccaccgcgcccggcccccccaaaggcatttttcgtctctactaagccctcacacaaaatatacaagtgtgtaagtaaatttctctttctatcataaacattggccttggcayaggaacgttaagtaaaactgaaaatgcaaatgaaccttgacatttttagtttcaaatattgcccccaaattcagcaaatttccaattactgtcgttgcatggtggtatcctcagcagatgggtgcaggaccccctgcagatgccaaaatctgtggatgctcaagttcctgatatacaatggtgtagcatttgtttataacctatgtacaccctcctatatgctttaacccatttcccatttagaaaaaaaaagtacttgacttggtgtggtggctcacgcctgcaatcccagcactttgggaggccgaggccggtggatcacttgaggtcaggagttcgagaccagcctggccaacatggttaacacccgtctccactataaaaatacaaaaaattagctggatgtggtggcgagcgcctgtagtctcagctactcgggaggctgaggcaagagaatagcttgaacctgggaggcggttgcagtgagccgagatcacaccattgcactccagcctgggcgacagagcaagactccgtctcaaaacaaaamaaaaaaaagaaagcaaaaaaagtgcagctcgctgccagcacagtattctcagggcaagcaagatatgagttaagtaatccctagattgcttataatactggctgggcacgatggctcacgcctgtaatcccagcacttagggaggccaaggtgggtggataatgaggtcaagagatcgagaccattctggccaacatggtgaaatcctgtctccagtaaaaacacaaaaattagccaggcgtggtggcacgcacctgtaatcccagctactcgggaggctgaggcaggagaatcgcttgaacccaggaggtggaggttgcagtgagctctgatcatgccaccgcattccagcctggtgacagagggagactccatatcaaaaaatatatatatttaatatatatatcaaatcatatccatatcaaaatatataaatatatatacatgcatatatatgtatgtatacctaaaacagtgtaagtactgtgtaaataaatagttgttaacctgtattttttgtttgcattttttattgttgtgttgttatttttgttggtttttgtttgtttttgagatggagtctcactctataaccccggctggaatgtggagtgcagtggtgcaatcttggttcactgcaacctccacttccctggttcaagtgattctcatgtcccagcctcccgagtatctgggattacaggtgtgcgccaccacgcctggctaattttttttctgtgtttttagtagagacggggcttcacaatgttgaccaggttggtctcgaactctcgacctcaggtgatccgcctacattagcatcccaaagttctgggattacaggcgtcagttactgtgcccttactgtgtgtgtttgttttgttttgttttacttcaaatattttcttctttttttttttttgagatggagtctcactctgttgcccaggctggagtccagtggcaccatctcggctcactgcaagctccgcctccccagttcacaccattctcctgcctcagcctcttgagtagctgggactacaggtgcccaccaccacgcccggctaattttttgtatttttagtagagatggggtttcaccgtgttagccaggatggtctcaatctcctgactttgtgatccgcccgcctcggcctcccagagtgctgggattacaggcgtgagccactgcacccggccttacttcgaatattttctattgtagttggctgaatctgcagatgtggaactcacaaatacagagggctgactatagatgagaaacacattatattcaagatttaccacttaagagtcctttctctaggtgcttatagaggttgagtatcccttgtcccaaatgtttggaaccagaagtagttcagattttggattttgatatatctgcgtatatataatgagatatcttggggttgggacccaaggctaaacatgaaattcacttatatatatatgtttcatatatatcttatacacctagcctgatggtaattttatacaatattttaaataattttgtgcatgaaacaaagtttgtgttaagtacttacgtgtggaatttttcattgtggcatcgtgtgggggctcaaaaagttttggattttggatcatttcaggtatcggatatttggattagggatgctcaacctctacagttttttagtcctagctgggcgccgtgactcacacctgtaattccagcactttgggaggctgaggtaggtgaatcacctgaggtcaggagtttgataccaacctgaccaacatggcgaaaccccatctctactaaaaatacaaaaattagccaggtatggtggtgcgtacctgtagtacctgctactcgggaggctgaggcaggagaatcacttgaacctgggaggcagaggtagcagtgagccaaattcgtgccactacactccagcctgggcaacagagtgagactctcaaaaaaaaaaaaaaaaaaagagtttctgattttggagcatttcagatgtcagatatttggattggggatgctcaaagtatatagttttggagtccttttggccccactgaatgactcctgtaaactcagatgctgtcttaccaacctgttttgcactctcctgatttttagtaagctttttaactgtagaaatcacataaaaagcttaaagattttcatgaagaaaatagaatttgccttcattattttggtttttttccccatctttttatttcaagcttatagaaaagtcaaaagaagttacagtgatctcccgttatacctttcatctagactcactattaatgtctggccatgtttggttttctctatacacgagtgtatataggtatgcatctgtatacgtgtacatgtatgtatgtgtgttgtgtgtgtctttttttttcctgaaccttttgaaagtaagtttgaggaacagttaccaggctgctgcagtgatctgtaagtggaaatgatggtgttttgtggtgtgagggtgtcatcgtaagtgctaggaggaggcgagtacaggacatcttaggtgcatacaggagagactcctaatgagtcttttctggtatccccaagaggcttcatgaagacagtgactggtaaactgcaacccaaaggactgtttggaattagccaggcaacaggtggaacagagcattgcagaggagaacatgcgtttgaggaaactgcatgtagatgtgtatgtccagatcatcccaggttgagatgaaaaaatggggagctgctgcagaaaggaatgagatttttttttttttttttttgagatggactctggctttctcacccaggctggagtgcagtggcacaatcttggctcactgcaacctctgcctcccaagttcaagcaattctcctacctcagcctcccaagtagctggattacaggcacccaacaccatgcccaggttatttttgtgtttttgagtagagatggggtttcgccatgttggccaggctggtttcccaactcctgacctcaggtgttctgcccatctcagcctccctaagtgttgagattacaggcgtgtgccactgcgcctgacgggagtagatcttttaagccaggcttaggaattgagattttattttaagggcaatggggagccattgaaggtgttgtttgtttgttttttgagatggagttttgctcttgttgcccaggctggagtgcaatggcacgatcttggctcactgcaacctctgcctcccgggttcaagcgattctcctgcctcagcctcctgagtagctgggattacaggcatgcgccaccatgcccggctaattttgtatttttagtagaggtggggtttctccatgttggtcaggctggtctcgaactcgcaacctcaggtgatccacccgccttggcctcccatagtggtgggattacaggmgtgagccaccacacctggcccagatttacaatttttaaagaatactctgactggagggtgaagaaagaattggagagaggtctgagaagaggcaagggggccagttaggatccatgggcaagatggtggcagtgagaatgcaaagagstagatgagattttcaggagaaagacttgacagcacagaactagatagggcgaggtgaggtagagattgcagaaagtcagaggcgagtcccagctttctagcttgggcagccgagtgggcgatggagcccttgactaagtagccagggagggaggagacactgaggtcagttgtgggtgtgattcgaagtgcctgttggagatgggttagagatgtctggctggcccctctgagctccaggatggaggcctggttgggaggcagtgcaggcaagtaacgccctgtgccttcttcccacacagcctcagcctcaccatgtgtgtcaggagctgtttccagtccccccgtctccagtgggtgtggagaacagccttcctgaaacacacccagcgcaggcaccaggggtcccaccgatggacacaccttggaggcagcacctacagagcggtgattttcgacatgggcggagttctcattccttctccagggagagtcgctgcaggtgagctrttgattctgtttcactttgtgggactagagtggtggtgggagaatggagggtgatcgggaaggcagaggggaacacttgggcagcagtgtgtcccagcaggccatgctctggctctcgagtcgaattccaagcaccactagggggctgagtgtcttgggcgcatgattcagcttctccaaatcttactttcctcatcattaaatgagctaatggtagtgccttcctccttgggatttggcggagagttatccgtgggaagcacttgcttagcacagtgattgctcagtgcatcctaaattctcaatcaatgatgagctgccatgaatgctgtgattagaatttaaccaccaaggcagggcacagtggctgaagcctgtaatcccagcacttttggaggccgaggtgagagggtcgtttgagcccaggagttcaagaccagcctgagcaacatagtgagaccccgtatctgcagaaatttaaaaattatctgggcatgatgacaggcacctgtagttctagctactcaggaggctgaggtcggaggatcacatgaatccaggtggttgaggctgtagtcagccgtgatcatgccactgcactccagcctgggtaacagagcaagacccttactcaaaaacaaacaaccaaaaatcccaaagaatttaaccacttcttcttgggaactgttctacttctgaaatctagaatgctgaaattccccttttgattacagccttcctcccttctaccccactccctctaaacctgcttctggactgacagggtaagggtcagccctctggtctctggtcttctctttaccagccccttcctggttttacttcttttctactcagttcagtttttattagttaaagtcgttttggcttcaagcagtagaaaacctaacaaaacagtgactgaaacaagctagaagtttctttctcttgcacataaaagcccaggtatgtggtctggggcactgtgtkatgcgactctgtggtatcagggactccgactctttatagcatgttgctctgctgtgacttttcatttccactcttacattgtggtctgtcttggctgtgtcgcctcctgctatcatattctcatgccagccagcaggaaggacaaagggccaggcagccatccctctccttttgaccttctgtggtggctggttggccagttctccatcctaaatcaacccaggcacaggttttctatgcctgcgtgtctaggctttccagcactgctgaccaaattactcagccgtgctaactggctgcacaagctggtttctgagctccagcctcagttgggccattggtgctacgcctgagcctctctgttccttcactcttatctctctgttccttcactcgtatctctgtcatgtttacctcaggggctgttccagactgtccactccccctgctccttaccacccccaaatattcttgctctgcagatagctgaatctgttcttctacaaagaacataaagactaaacctgagcaacacagtgagaccctatggtgagctaggattgcaccactgcaccccrgactggcacaacagtcttttttagagaacctgtctctaaaaaaaaaggcagcagggaagaacataaagatcactggacagaaagtttcttgactttctctagaatatcttaagaaccaattcacttctctccattgccactgcctccacccttgccttctctcacccaaatgatgtcatcagcctcctaacttcctctgcctctggctctctggattttacaaaatctcctcccagctccagaattaacctttctaaaacatggatcgtgcttctgcgcttagcagctcacacctgtaatctcagcaatttaggaggccgaggtgggcagatcgcttgagcacaggagttcaagaycagcctggccaacctggtgaaaccttgtctctacgaaaaatacaaaaagcgtacctgggcatggtggtgcatggatgtagtcccagctacttgaggggctgcggtgggaggaactctttagcctgggcgattgaggctgcagtgagctgagattgcaccactgcactccagcctgggtgacaaagtgagaccctgtcacaaaataataaataaaataaaaataaagcatagatcttgttcctytcatccctggcttgaaaatcttgaatgcctgcatgtggtcccctagattaagtctagaagctttcacctgggattcagggctcctctcagttttagctttcctgctatggactacctgatgctccccaggcatgccaggcacatttgcatgtttgtgcctttgcaagctgtgtttcctccctgcctcctctgcctgttcaaatcctactgatgcttttaatggcaaatttaaggggatattattcagcaatgactggaatcttttgaacactcagtaaatctcatggttgttactaacttcaagagtcctcttctgtcaagacttctccaacctcatttgcaacctgggcagaatgttcctggatagccaattcccattaagtttcaccttcaccgagatatttttgtttgcagtgggatatgttcatgtctcctctatggggctcttggattccaggaccccaggtctgggatttcttcacttcactgttgcagtgttagctctgcaggctggctcagtcattcaggaaatgtttgatgggtaaatgtgaacaaaatagtgatgccttctactttgtcttttgcttgactggagcttctaatgttatttatttcaaatgaaccatatcaagggtcatttgataagaatatactagaattggccaggtgcggtggctcatgcctttaatctcagcactttgggaggacgagatgggcggatcacttgaggtcatgagtttgagaccagcctggccaacatggcaaaatccaatctctactaaaaattcaaaaataagcggggcatggtgatgggcacctgaaattgcagctactctggaggctgagcagggagaaccacttgaacccgggaaacagaggttgcagtgagctgagatcataccattgcgctgcagcttgggagacagagcaagactctgtctcaaaaaaaaaaaagtatatatatatatacactagaattactgtactatactatttttttttttcttgagatgggatcgcgctctgtttcttaggctggagtgcagtrgtacaatcatggctcactgcagcctgaaactcctgggctcaagcaatcctgcctcaggctcccaagtagctgggactacaggtgtttgccactatgcctaatttttgttttttatagagatggggtcttgctatgtttctcaagctagtgtcgaactcccgggctcaagtgatcctcctgccttggcctcttgagtcattggaattacaggtgtgagttaccatgcctcacctgctgtctgtttttgtatggcctgtcagccaagaatgacttttatgttttgaaatacgtaattgaaaaatatcaaaacaagaataatattttgtgacatgtgaaaattatgtgaagttcatatttcaatgtccataaaaatgaaattttttagaaaaccatcttgcccatttgtttacatattgtccatgactgcttttaccctgtactggcagagttgagtaatttcaacagggtccgtaatgctttcaaagcctaaaatatttaccatctggcccttttcagaaaagcttgatttaagctgttagtttactataaaattagtacgcacaacaaagaattcaaagtatagcccaaacattttagtttttttattttttattttactttatttttctccaagaatgcattttcagaccaaagctcaaacactttaagattgaatttaggccgggcacagtagctcacgcctgtaatcccagcagtttgggaggccaaggcaggtggatcacgaggtcaggagattgaaaccatcttggctaacgtggtgaaaccccgtctctactaaaaatacaaaaaattagccaggcgtggtggcaggtgcctgtggtcccagctacttgggaggctgaggcaggagaatggcgtgcacccaggaggcagagcttgcagtgagcctagatggcaccactgcactccaacctgggcgatacagcgagactccgtctcaaaaaaaaaaaaaaattgggcatggtagtccatgcctgtaatcccagatactcgggagactgaggcaggagaattgctggaactcgsgaggcagaggttgcagtgagccaagatagcaccactgcactccagcctgggtgacagatcaagactccgtcttgggagaaaaaaaaaattgaattcagagggtataatgatttcgaaacttcaaaatgtttgactttaaaatttttgttagtgtgatagatgaaaattccatctttgtggtttcttttcttttccttttttttttttttttgagacagagcatcattccattgcccaggctaaagtgcagtggcgtgatcttggctcactgcaacctccatctcccgggttcaagcaattctcgtgcctcagcctcccaagtagctggtattacaggtgtgtgccaccatgcttggctaatttttgtattttcagtagagacagggtttcgccatgttgaccaggttggtctctctcttttttttttttttttttgagacagagtcttgctctgtcgcccaggttggagtacagtgatgctatctcagctcactgcaaacttcgcctcccgggttcacaccattctcctgcctcagcctcccgaagtagctgggactgcaggcatccaccaccacgccctgctaattttttgtatttttattagagacaggtttcactgtgttagccaggatgatctcaatctcctgatctggtggtccgcccgccttggcctcccaaagtgctgggattataggtgtaagccactgggcctggccttttttttcctgttattttaatgttcatttgcctgattgcaactgaggttgcgccttttttttttttttttgagtcggagtctcacatttgcctgattgcaactgaggttgcgccctttttttttttttgagtcggagtctcactctgtcacccaggctagagtgcagtgctgtgatctcggctcactgtaacctctgtctccctggttcaagctattctccttcctcagcctctcgagtagctgggactacaggtgtgcaccaccacacctagctaattttttatatgtttttagtagagatggggtttcaccatgttggccaggctggtcttgaactcctgacctgaagtgacttgcctgcctcagggttccaaagtgctgggattataggcacaagccactgcatctggcctttttttttttttttttcagagagcatcttgctgtatggcccaggctgtcaggctggtctcgaactcctagtctaaagtgattctcccgcctcctgagtagtgagcctttttttttttttttaatattattggtcattcagtttttccgtgaattgctcacttttcttgttgattttcagtaaacctttttttttttgagacagacttttgctcttgttgcccaagctggaatgtaatggtgcaatcttggctcaccacaacttctgcctcccaggttcaagcgattctcctgcctcagcctcctgagtagctgggattacaggcatgcaccaccacccctggctaattttgtatttttagtagagacggagtttctccacgttggtcaggctgctctcgaactccctaccttaggtgattgcccgccttggcctcccaaaatgctgggattacaggcatgagccactgcgcccggccggtmataaccgtttatctgttacatgatttgcaaatattttctcccttttatgccttgtcttttgattttattgataatgcttttagctgtaccaaagttttctttttcttcctttctttttgaaacggaattttactctgccactcaggctaaagtgcagtggagtgacctcggctcactgcaacctctgcctcccaggctcaagctatcctcccacctcagcctcacaggtagctgcactataggctcgcaccaccacacctggctaatttttgtattttttgtagagatgggttttcaccatgttgcccaggctggccttgaacttgggagcataaacaatctgcccacctctgcctctgcctcccaaagtgctgggattttagccatgagtcaccacgcccagccttctatattattttctaagttttagaattttgtttttctgacttggatatttactgtattgggaatttgttttgtgatggcctgaaagatgatttaacttaatttctattccatattgaaacctagttatgccaaccccatttattgaatagtcactgctaaaagagcataaaatacagataaaatttcctgctgccacctcgaccctttcccagttggttccagacttaagtggttatcattgtgaaaagtttcttgtttatttttgaaaaattgcccgtgtgtgttgggggtgggtgtggggggcatatacaaattggatcatatgctgtagactgttccatagcttttttttgactcagtatgatattttgccatctttttcatatcagttggcatatgtctaggatctagtttggaggttagtaaactttttctataaagggctagacatggtggatgtgatggcttatggctacgatcccagcactttgggaggccgaggtgggagactgtttgaggccaggagtttgagactagcctgggcaacatagtgagatccccatttctacaaaaaataaaaaaattagctgggcatggtagcacgcacctgtaatcccagctactcaggaggctaaggcagaaggatcacttgatcctgggagcttgaggctgcagtgggccatgactgtgccacagctccccagcctgggcaacagcaagaccccatcttaaaaaacaaaaataaagaagggctagataggctttgtgagccatactctcagtcacaactattcacttctaccattgcagcaagaaagcaataatagacaatagtaaacaagtgtggttgtgttccaataagactttatttacgaaaataggtagagccaggcatgctggtgtgtgcctgtagttccagctactagggaggctgaggtgaaggttcatttgagcccaggagtttgaggccagcctgggcaacacagcaagaccccatctcttaaaaaaatagataggagacagatttggccccaagccatattttgctgacctttgggcaagtttatatgttttaacatctgtgtggtattccgttatatgaatatatcataattgatgtaataaacaccttattagtatacatttaacttttctagttctttttattatgagcaattctgcacaaacaaccttgtacataacctttgcttactttcataaatatatatggaagaaatttctgaaagtagaattactacgtcaaatgtatgtgcatttcagattttgacagaaattatcaaattgctgtctgcagaggttgtgcttgtttacgctcccgtcaacagcatatgatggtgccggtttcctcacatgcttgccaactccgagactgtgaaaaatgctatatgctttagctctaaaattaaagtattttttggattgagttttaaaagtcttgttattttcaaaggacatataccagattgttaacattagttatttctgaaagaagataggactgcttgtccttttactttccttccttccttccttcctcttctttttttttttttttttttttttttaagacatggggtcttgctctatgtccctaggctgcagtgcggtggcaccatcatagctcattgcagcctcaaactcctgggcttaagcgatccttccacctcagtttcccgagtagctagaattacaggtgcaacccatcacgccaagctaatttttaaattttttctagagacagggtttaatcatgtggcccaggctggtatcagactcctagcctcaagcgatcctcccattttggcctcccaaagtgccgggattataggtgtgagctactgcacccagcctactttcttttgcatagttttctatgaaatatattgtctgaaaaattttcaatgcacagacactactttatcagaaaaaaacaacaaaggtgttttaattccaaaacaaaagctatatgtaaagtgtattttgtcttagatatataattatgaatgttgtatgtatatatttgcccccagcatctgtattatagacagaaaaagcaactgtggatgaggagaaacagtccttgcacaaatgttcccagtattctacagatgctgatgctgatccatccactgccttagctctttgtggacagaaatttccttcttggccaggcacagtggctcacacctgtaatcacacacagtaccttgggaggcccgaggcaggcaggcagatcacctgaggtcaggagtttgagatcagcgtggccaacatggcaaaaccctgtctctactgaaaatacagaaattagccaggcttggtggtgcaygcctataatctcagctacctggggggctgaggcacgagaatcagttgtacctgtgaggtggaggttgcaatgagctgagattgtaccactgcactctagcctgggtgactgagtgaggctttttctgaaaaaaagaagaaatttgcttccttatccacaaagacagcatttcaggcgaacatttcagtgtactcactccatgctgtgaagaattactatagcctatagaaggaagggcatgttctaggggccaccaggatctggcttcttccttcatgtgcttccatagtctctgccaggtccaggtaagtgacctaacatatggtccagtgaatatgagatcaaggaataaaattcatcatgcagtgcccggagtcctctcaagcaaccactgaggatctgatgcttcacagcagtgtgctctctgttgtacacattagcattgctcttcctctgggggtctaaggttgagattttgcattttgtgaatgtctgcaaatttccaacagcatccaccctggcagtacagcgagtccgtaggaactggtatggtaattttcctgagctccctaaaccccagcatgtatcaatgtattccacttttgcatattttgcttcctatagaatgggaggtacagaatcgtatcccttctggaactatattaaaggccttgatggaaggtggtgaaaatgggccctggatgagatttatgagagcagaaataacagcagagggttttttacgagaatttgggagactttgctctgaaatggtgagtggtaaacatacctacatttccatatttttctttttgccttgagtagtggttgcaacattcatgtataagttagttaaactgaaaataaagtgaaacctaataacccattacatgttttaaagttatttcttaggccaggcgcagtggctcatgcctataatcccagcactttgggaggcccagggggtggatcacctgaggtcaggagttcgagaccagcctggctaacatggtgaaaccccgtttctactaaaaatacaaaaaattagctggctgtggtggcgcacayctgtaatcccagctatttgggaggctgaggcaggagaattgcttgaacctcaggggtggaggttgcagtgagctgagatcatgccattgcactccaacttgagcaacaagagcgaaactgtctcaaaaaaaataataataaagttatttctttcacccctaggtgttcaatgttcaattcatatatgaataactaaaaatattcttagccaggcgtggtggctaacacctgtaacttcagcactttgggaggctgagacaggagaagtgtttgaactctggagtttgagaccagcttaggcaacatagccagaccttgtctctactaaaaatcaaaaaaattagccaggcatggtggtgcacacctgtggtcccagctattcaggaggctgaggcttgagccctagggattgaaacttcagtgaaccatgaccgtgccactgcactccagcttgggcaacgtaacaagactctgtctcaaaaaaaaaaaaaaaaaaattctttactaagttcctccagcatatatttttttaatgttttctggtgtattataaaggatgttatgaaggatacgaatgaacagccagatgacaagatacctgggggcaaaggttttagagccactgtgccctttccaggcctgccaccctcctcccagcacctccatgcattcagcaacctgaaagctcccctctaatagatactaaaacaggagctgtctacataatggctttgataaaaaagcttttttaaagcaataataatattgaacattttttctgtactgtgcactgttctaagctctttatataactcatgtaaccrcaatagctctactaaaatataatttaaaatatagtaagaaaagttctgtaggtagatggtgatgatggtgatggttgcacgacaacacgactgtacttaatgccactgcactgtgtacttaaaaatggtcgagtgcagtggctcacacctgtaatcccagcattttgggaggccaaggagggcggatcacctgaggtcaggagttcaagacaagcccggccaacatggtgaaaccccatctctactaaaaatacaaaatttagccaggcgtggtggtgggcatctgtaatcccagctacttgggaggctgaggcaggagaattgcttgaatctgggrggcagaggttacagtgagccaggatcaagatcacaccactgcactccagcctgggtgacagagtgagactccatctcaaaaacaaaaacaaaaaaaggttaaaatggtaaattttgtgttacatatattttccacaatttatatatatatatatatataaacatatatgtgtatatgtaatagtaaactttgaaaacattatgcaaagtgaaagaagccagtcaaaaaagactgcatggtgtatgattccatctgtgtgaaatgtccagaataggcaaacccatagagatagaaagtagattggtggttttctagtacaaggagactttgggggaaatgaggagtgactgttaatgggtacggtttactttttttttttttaattttttttttgagacacagtctcactctgttgcccaggctggagtgcagtggagcaatctcggctcactgcaacctctgcctcccgggttcaagcgattctcctgcctcagcctcccgagtagctgggactacaggcgtgtgccaccagctccagcyaatttttgtatttttagtagagacggggtttcaccatgttggccaggatggtctcgatctcttgaccttgtgatccgcccaccttggcctcccaaagtgctgggattacaggcgtgagccaccacgcctggctggtttgctctttagagtaatgaaaatgtcctaaaattgatggcagtgatggttgcacaactttgtaaatatattaaaaaccattgaattgtactctttaaataggtgacttgcatggcatgtgaattagagttcagtaaagctgttctaaaatctgtgtgtgtatatgtatatataaaacagcagacttgcctttgcagattttgaaatgtgataatataagagttttctttctttctttctttctttctttttttttttttttttgagacggagtcttgctctgttgcccaggctggagtgcagtggcatgatcttggctcactgcaacctccgtctcctgggttcaagcaattctcctgcctcagcctccccagtagctgggactacaggtgcgtgccaccacgcctggctaattttttgcatttttagtagataaggggtttcaccatgttagccaggatggtctcgatctcctgacctcgtgatctgcctgcctcagcctcccaaagtgctgggattacaggtgtgagccactgcgcccagccttataagagttttcaaaacccacacagattgaatttaaaaacaagaaaaaaattgatcagaaactaaagttcataatggtgatactgaggcaatataaaaagcattaaatgacttctcaatcattaaaaattaaattacatatacttcatatacttttagatttcactgtatcctcttatgatatgctgttttttttttcaactagcaatccatgagcagaataaagaactcatttaattgtaatattgatataaatagctccattccctactgtgttgctcaggctagagtgcaatggcttgatcatagctcactgcagctccaatctcccaggctcaagccatcctcccacctcagcctcctgagtagctgggaccacaggtatgtgccaccaagcctagctaagttaaaaaaaaattttttttagatctcactttgttgcccaggctggtgtcaaaatcctgagctcaagcagtcttcccacctcagcctcccacagtgctgggattacaggtgtgagccactgtgcccagcctataactctagtcctggataacttttaaaaaccttatatgagagttcagcacaggggctgaggaacacagttcctgcaggcagcaagctatgagcctgggctcttgtagcagagagcagaaggacgccaggaataagcattttttttttctgttggccatgagtgtttgtcactcttaatgattgctgttctcctgtgccctctcctgttcttagttaaagacctccgtgcctgtggactcatttttctctctgttgaccagtgagcgagtggcaaagcagttcccagtgatgactgaggccataactcaaattcgggcaaaaggtcttcagactgcagtcttgagcaataatttttatcttcccaaccagaaaagctttttgcccctggaccggaaacagtttgatgtggtaagcttgagctaattgaaaaccattggaacagaatctgtgccctcgcttcagggtgcaatgttaaatgctatcttccagcaggtcttgagtgagggagtttttccttcagccacttgactaagttaggtttaaatgcaatatgttgaaaacagaccctttaagatatcactgtgttcttagcaaggtcagacatttatggcatttgattactggttgacacttcagctttacattctaaattcgaaccttagtcttcatataacacaagcatctctgtcagccctcatatcgtaatggatcctttggccttttctaagaccaactatgttgccttctatttctgtgacgttagttcctagaccagtgctgtccaataaaattttactgccttcctcggcctgatttacttccatactaaatccatctgctccatgtgtgtatcccaacctgtcatgtgataaacctatcgttttgacatgcttggctatatttgggtactttacctatttatttatttttatttttttattttgagatggagtctcgctctgtaacccaggctggagtgcagtggcacaatctcagctcactgcaacctctgcttcccaggttcaagtgattctcatgcctcagcctcctgagtagctggaattacagatgtgtgccaccatgcctggctaatttttatatttttagtagagacgggggtttcaccatgttggccaggctggtctcgaactcccaacctcaagtgatccacccacctcagcctctcaaagtgctgggattacaagtatgagccaccgtgcctggcctatttatttttttatatatatatatatatatwtttttttttttgagaccatctcactctgttgcccaggctaaagtacagtggcaccatctcggctcactgcagcctccaccttccaggctcaagcagttctcctgcctcagcctcctgagtagctgtgattacaggcatgcaccaccacccctggcaccaccacccctgaatttttagtagagacagggtttcaccatgttggccaggctagtctcgaactcctgacctcaagtgatctgcccacctcagcctcccaaagtgctgggattacaggcatgagccatcgtgcctggcccctatttgggtactctctttttttttccttgagagaaggtctctctctgtcgcccaggttggagttcagtggcgcaatctcagctcattgcatcctccacctcctgggctcaagcaattctcgtgcctcagcctcctagtagctgagactacaggtgcatgccaccacgcctggctagtttttgtgttttttatgaatattagagactgggtttcaccmtgttggccagggtggtctcaaacttcagacctcaagtgaccaacccacctcagcctcccaaagtgctgagattacaggcatgagccactgtgcctggccctatttggatactttaaaaatgtttgtttttgtcttataaccaacagcagtgataattccctttagaaactccaaagcccagattggcagttgatcttccagcaccttttagagttgtgatggatcagaaggacccttcccctggcccattcctccaaggatattctgagtcagtgcaaaagggaacagctcatgaaatatagtgagagtcatggtagcctctagaacacatcagattaaatttctctgataactcaagtattggacattttgctaccagagcccctttctgattctttccatctttggaagagctacttttgctggactccaggaagtggcatattaccttagccctacatctgcctatgcctgggtgtatttgtacccttcgttgggccagtgagattaaagattttcaactctgcctacacatcacatgacctgggagtttgtaaagatgctgggtctgtttccctggaggctttcattgagtatgtctagttgggatccaggcatgtgtatttcgaaaaagctccacaggtgattctgccttgcagctggggtgagataccccaagacgcagtgagggacttcagattctgtccatgcttttctcttatcagacagcctctgtcatgcttaccttgagaaggaggcttcccctccatcttcctgggatagagccttgataaataaaatcatttttatctgatctacatttggaaaaacactgaccttgttcccacagttcctgctttgccaagaaagtaatagaagccctgaataagttcatgccatcatgtgcaaaataagaaagagaaggctagagatcttatcaaataaatcttaagaatttattttacttcccccagatgtaattcacctagtgagaggagccgaatgcttcctggaactttgccccatcccccccaattccctccactctcctagctcttgtctcagccagtacagctctgccacttccatctggtacgttacatcgactggtgtctgaaacaccctgcttctgtacttctcactattgacgttttctttagggtagcctcttagactttttttttttagctcattcaggtccttaggagacaagagaaagtagaaaggtccagtttattccagacatttatttacctgaaagggcagttctcacccaacccagaatgcaagtgtagggtagagagaggggccactgggtttgtccttggccttggagagcttgggtcattccaagtggcaagtcagagatttagttctgttcttagggcagatcagagggtattggttataggctatgtggctataggagattgggcccactctataggagattamgccctggggacactgtaaaaggactttcggggaatcagtggatcagagacagcctgacactgagaaggctttcccgtgttctcctgaactctcaccagcaccctccacccattacggatcagatatgtggctgaagcaaggtcgtcagagtacaggagcctcttagcatgtcaggaacagtgtcagccctcccatggaatttctgtctaaatggagtatggatgggtttttaacctctgaaataaacactaagttcgtatttattttatacctgtaatagtgtcttctttctgcaaaaaaaaaaaaaaatggcgaaatgctttccgtcaaactgacatgtacagcttttcttctgytctgtttagccccaagatgtgacattagccaaatgctttgtcattttggaacycacttaagtttcatttaagtttcacaacttactgagctaagataggtacgatgactattaatattattcccattttattgatgatggcactgaggcccattatggctttgctcgtttgcacagggtcacagtgtctgaaacagacactttggtttctcgagtttgcccccacgttgtaacccagtattgtcaaattactcaatgtaagaaggcaacatcattttatatcataacactcttaaattacttgttataataaatctcaactgtccttcttatgcttttcctctcaaaaagtttaccagcatgcatgtgggagctccacctttcgggacattcatctctcattcctgtccctccatcagattgtggagtcctgcatggaagggatctgtaagccagaccctaggatctacaagctgtgcttggagcrgctcggcctgcagccctctgagtccatctttcttgatgaccttggamcaaatctaaaagaagctgccagacttggtattcacaccattaaggtaatagtcactaatttttgaactccctcccatgcaccagccactaatgmaatgtttctctgtaatctttttacatttgtagctctagctttccttagggtttccccctgtgtttccatagtcatcttattttgtgttaattatgaaatctatgtgactagctgcttgtattttcaatgggaagcaagacaaacaggtactgcgaaggcaggttgagaaaagagatgggaaaggaggtgaatggcaggcttaagacctttgtgggggtgttcacactgtcctcatgatccagtgatgctgccttaagtggggagccagtggccaccagccatgcaggccatgcagctcactgctgtaaagcacgagaagccatgtgagggggtctcatgccaacttttttctattctttttttttttttttctcatacagggtcttgttatgtcacccaggctggagtgcagtggtgcaatcatagctcactgtagcctcaacctcctgggcttaagtgatcctcctacctcagtctcctgagtagctgaccagaggcatacaccaccacacccgactaatttttgtattttttgtagagacagggttttgccgtgttgcccaagctggtgtcgaactcctgggctcaagcgatctacccaccttaccctcccaaagtggtgagattacaggtgtgagccaccatgcctggcttctattcttctatgtttgggttttcatcgtcgagctgatgggcctgtagggtaagagcaaacgttgtaacataatcttctttcttcttggcacaagagggtattgtgaaatttttttttttttttgaaacagagtttcactttgtcacccaggctggaatacagtggcatgatcttggctcactgtaacctctgcctccctggttcaagcaattctcgtgtgtcagccccctgagtagctgggactataggcgcacgccaccatgcccggttaattttttgtattttagtaaagacagggtttcaccatgttgcccaagctggtctcaaactcctaagctcaggaaatctgcccgcctcgcctcccaaagattcacggcctcaccacgcccggccgtgaatcttttttgagatgaggtcttgctaggttgccgagggctttgaactcctggactccagcagtcctcccacctcaggcttcccaagtggctggaactgtgggtgcacaccatcatgcctagctgttttgtgaaccgttgaccagtgcttctctctgcaggatagaaagttcagtgtggttaggagttaaatgggaagaggaaatgcattctactgctccctcattagctaaatatcctgggttcgaaggccttcctcagagtactgacttctttgataatttccctctaaaggactaccctttgtaaaaagtaaagtagaggttcttctttaaagactttccttattatttaattaggaataaatagtaacttcttttagaagcaaaatttatttaaagacctgtgctaaattttttgttgttgttgttgttgagacggagtctcattctgtcgcccaggctggagtgcagtggtgcagtcttggctcactgcaagctccacctcctgggttcacgccattctcctgcctcagcctcccaagtagctgggactacaggcatccactaccacgcccagctaatttttttgtatttttagtagagacagggtttcactgtgttagctaggatggtctcgatctctcgatctcctgacctcgtgatacgcctgcctcggcctcccaaagtactgggattacaggcgtgagccaccacacccagctgacctgtgctaaaattttttttttttttttttttgagatggagtcttgctctttcgtccagtccagactgcagtggtcctatcttggctcactgcaagctccatctcctgggttcgcaccattctcctgcctcagcctcccaagtagctgggactacaggcgcctggctaattttttgtatttttagtagagacggggtttcactgtgttagccaggatgatctcgatctcctggcctcgtgatccacccgccttggcttcccaaagtgctgggattacaggcgtgagccaccgcgcccagctatgctaacatttttaaatatttgctagctgcaataaagaaattaatgtattttatgtttttagttcctgcaatttagtctaaatatttgccttggcctgctaatactggtccaagcaagtattgggtcatagcttgttcctcttctttatttgaaggtgtttttatttttctcagcattttacaagttacttccttcttcctttgttttcctctacctttgcctcttttaaaaagttttaagttgctagccaattaggacaaatacagaatgtaaagtctcgttccagccaatggaaactggacacagcagtaggatggatgcgtcagcttataaatgaccctgtctcctttgtttggtgtactgttgtggcaaaactgctggtgagtgtaccctttctgcaggaagtaaaaatggccttgctgagtaaattaaatttatgttcaagtgctatgtctttgtggcaccggggaacaaacatttcagacacctcctaggaaacagataggagcccctgaggccaggattgactgctggcacctgttcaatatatattctctgcacctgtactaccatgaattgtaaaattaaaaatatatacgtgtatatattctcaacatcctgtgaaaggaagggaaaaataacaacaacaaaaaatatacatctacatattctctctgaaaccaggttaatgacccagagactgcagtaaaggaattagaagctctcttgggttttacattgagagtaggtgttccaaacactcggcctgtgaaaaagacgatggaaattccgaaagattccttgcagaagtacctcaaagacttactgggtatccagaccacaggtatgtgggcttctttcatgttttggtagctctctccaaggcgaaggttttggtctgtttctcacttttcaaccctaatggaatgggctggagacaaagaagctttacagtgaggaaaatagccattgggcctggtgcatcggagcactgctttcagttttgcttgggaaaaagcattaacttccctatttatgcatctccaaaagtgtacctatcccactcttacacctgagagtgtggtatggcagtggttgcctgctttcaacagggagaggaacttggggactgcagtgtgtgctcagaggattttacagtttctaatgctttgagacgacagcccattttgtgaagacgacttagaagttacatcggcaggcgggtgcggtggctcacgcttgtaatcccagcactttaggaggccaaggcaggtggatcgcgaggtcaggagtttgagaccagcctggctaacttggtgaaaccctgtctctactaaaaatacaaaaattagctgggtgtggtggtgggtgcctgtaatcccagatactcgggaggctgaggcaggagaattgcttgaacccaggaggtggaggttgcagtcagccgagatcgtgctactgcactccagcctgggtgacagagcaagactccatctcggggggaaaaaaaaaaagaatttgcattgctgaccggggcgtagtggctcacttctgtaattccagcattttgggaggccaaggcaggtggataacttgaggccaggagttcgagaccaggctgaccaacatggtgaaaccttgactctactaaaaatacaaaaattagctgggtgtggtggtgcacaactatagtcccagctgctctggagactgaggcacaacaattgcttgaacctgggaggcagaggttgcagtgagccaagattgtgccactgcactccagcctgggtaacagagtgagactccatctcaaaaaaaaaaaggaaaagaaaaaaaaaaagggctgggcgcagtggctyatgcctgtaatcccagcactttgggaggctgaggcaggcggatcacctgaagtcaggagttcgaggtcagcctggccaacatggcaaaaccccatctctactaaaaatataaaaattagctaggtgttttggcgggcgcctgtaatcccagctacttgggaggctgaagcaggagaattgcttgaacctgggagactgaggttacggtgagctaagatagtgccactgcaggcctgggtgacagagcaagactccgtccccccccmaaaaaaaaaaggaaaaataatgttgctgggtgtggtagctcacccctgtaatccccagtactttgggaggccgagatgggcggatcatctgaggtcaggagtttgagagcagcctggccaatatggcgaaaccccatctctactaaaaatacaaaaattagccgggcatggtggcacatgcctgtagccccagctacttgggaggctaagacaggagaatcacttgaacctggaaggtggaggttgcagtgagctgagatcatgccactgcactgcagcctgggcagcagagcaaggctctgtctccaaaaaaaaaaaaaaaagttgcatgattttaaaacgcaacaaattgtctccatttcttggagacaagttttctctttcctccttcacattcccccctcagaaaaccaggtgccttgtgtgctttagaggacacttttgggccaggggtggtggctcatgcctgtaatcctaccactttgtgaggctgaggtgggcagatcacttgaggccaggagtttgagaccagcctggtcaacatggcgaaactccatctctactaaaaatacaaaaattagccgagtgtggtggcgcatgcctgtagtcccagctactggggaggctaaggcagaatcgcttgatcccaggaagcagaggttgcagtgagctgagatcacgccactgcactccagcctggacgacagagggagagtccatctcaaaaacaaaagaaaacaaaaaagaagacttacaaaattttttaaattaaattaaattaaattttttttgagatggagttttgcccttgttgcccaggctggagtgcaatggcatgatctcagctcactgcaacctccgcctcttgggttctagtgattctcctgcctcagcctcccgagtagctgggattacaggcacccactaccatgcctggctaatttttgtatttttagtagtagagacggggtttcaccacgttggtcaggctggtctcaaactcctaatctcaggtgatctacccgccttggcctcccaaagtgctgggattacatgagcctccgcacctggccaaagaagacatttttcccaggtaataaaggcttcacccacttgctccgtgaaaaaggcttttattgatggagtttcatgttaggatgttttccagcaattggattattggtagtggcctctgcacagctgaggcgcccactctggccagccagaagaactcaggccgagttctgttgcttgcctactcttctaaccaagtgaaatcagtctatacccagggttcagtcttcttatggagctgagaatgaattagtttcacctcagccaggatcctgcaagggagccacagaattcagcctagtgcagtgggaaattacatctcatgaaagcagctttgggtcaggccgaaggcctctgtgtcactcctttcagctgtcccagcagtgtcaggcagagggacgtgcaagggcacctttcatcctcaggcttaaagcattccatttggcaagatgggttgccatggctgcgtttgtgcttgataaacagaatgaacatgtttttattcatggagcaggagctggcaggaaggacaaaattggacacctgcacaaactgagaaaattactgtggtataaaatgaatggcctttgacaaactgtagtggcatgtgatcctggacctgagttggcggagtgtagacctgggactcagtcactcctagtaggcagagaagaggtacttttcttgcactgcatggcagatgaggatattttgaagcccaaatgcagaactcattagaaagaaagaatgtctgctcagatctgtcctccagggctggtttgagttttctttgttttcaaacttgcaggcccattggaactacttcagtttgatcacgggcagtcaaatccaacttactacatcaggctggctaatcgtgatctagttctgaggaagaagcccccagggacactccttccatctgcccatgccatagagagggagttcaggtaagttttcagggccaggggagcacttgcccactagcctccactgtgcacaagctcagccctaaactgaaaagtcagcactccataaaaataccccaagacatttaaaactacaattatgggccaggcttggtgggtcacacctataatcccagtgccttgggagaccgaggcaagaggatcattgagcccaagaggtcaagaccagcctaggcaatgcagcaagaccctgtttctaccccccatccccccccaaaaaaaagcctgggtgtgctggcatgaacctgtagtcacacctactcaggaggctgaggtgggaggattgcttgagctgggaggttaaggctacagtgagttactgtggcatcattgcactcccacctgggagacattgtgaaaccctgctccaatcccccaaaaagccaaatgtaaattagaactattctggaaaacaatatgatacaatttattaaaagcctcagcgttttcatactttcagacctaataattccaattctggggctctgtcttaaagaaataattctaagtagggggaaacagctgtatgtattaatatgctcaccataaagttgtttaataataagaatttggaaggccaggagcagtagctaccatagtcccagcactttgggaggctgaggcaggtggatgacttgaactcaggaattgaagaccagcctggacaacatagtgaaaacctgtctctaccaaaaatacgaaaaattagttgggtgtggtggcacatacctgtagttccatctactcaggaggctgaggtgggaggatctcttgaacctgggaggtggaagctgcactgagccgaggtgggcaccactgcactccagcctgggtgacagagcgagactgtgtctcaagaaacaaacaaaagagtttggaaactacttaaatatactataatctgtaccataatcaggaaataattaagtaaaccttggtatatatactgtcgcaatgacagtaatagtaatagctaacatttatcgaatggttaatatgtgccaggcactaaaataaatgcttcgaatgtctgttactgcagagcatcctcacaactctatgatatgttacaattatagtcctcatttacaactgggaaaagtaagccttaaagaaaccaaggcaggcagatttgctttgagctcaggcgttcgagcccagcctgggcaacatggtgaaaccctgactctacaaaaaatacaaaaattagccgggtgttggtgacttggacctgtagtcccagttacatgggaggctgaggctggagaatcacttgaacccaggaagcagaggttgtagtgagctgagatcgtaccgctgcactcacaaagtgagaccctgtctcaaaaaaaaaaaaaaaaaaaaattaaccagcatacccagggtcataaaactagtaagcaagtgctagagtctggctttatagccagtctgtgagatttcatagctcacctttaatgattatgctgttattgcagctaataaaagtatgcctataataacaaatgtgtatgataaaattttaagatagtaaaggcagatacaaactgcatatatagtattagctgattttttttttttttttaggcagagtgtcactattgtccaggctggagtacagtggtgtgatgatacctcactataatctcgaactcctgggctcaagtgattctccgcctcagcctcccaaatactacaggcacatgccatcatgcctggctagttttaaaaatttttttgtagagatggggcctcactatattgcctgaactcttggcctcaagcaatcctcccaccttggcctcccaaagtattggggattacaggcatgagccagcgtgcctggccaaggtttttgattattaattcaatttaacaaaaatgttgttactcagatattttatttcatcttgttttagatttggtaagttgtaatttctaaggagtctgttcatatcacctaagctgttgaatttatgatttataatattcccttactatccttttaatatacgtaggatctatagtgatatcctttttttttttttttttttttttttttttttgaaatggagtcttgctttgtcatccaggctggagtgcagtggcatgatcttggcttattgccacctccatctcccaggtccaagtgattctcctgccttagcctcccaagtaacagggattatagtcacacgccaccatgtccagctaatttactatttttagtagagatggggtttccccatgttgaccaggctggtctacaacccctgatctcaagtgattcacctgcctcggcctcccaaagtgctgggattacaggcgtgagccactatgcccaccctagtgatatcctttctttatcactgctggtattaactgataatttgtattctctctctcttgttagtctagctagggatttatcaattacattgatctgggaaccacagtttggttttgttacttttttctattgtttgttttgttttgaggcggagtttttgctctgtcacccaggctggagtgcagtggcgcaatctcggctcactgcaacctctgcctcccaggttcaagtgattctcctgtctcagcctcctgagtagctgggattacaggcatgcgccaccatacccaggtaatttttgtatttttagtagagatagggtttcaccatgttggtcaggctggtccgaactcttgacctcgggtgatccgcctgccttggcttcccaaagtgctgggactacaggtatgagcctctgcgcctggcctgtttttcttttctaatacaagcatttaaatatataacttttaaggctgggcgcagtggctcccacttgtaatcccagcactttgggaggccgagccaggtggatcacctgaggtcaggagttcaagaccagtcttgccaacatggtgaaaccctgtctctaataaaaatacaaaagtaagccaagtgtggtggtgcacacctatagtcccagccaatctcgaggctgaggcaggagaatctcttgaacccaggaggcagagattgcagtgagcggagattgcagtgagccaagattgtgccatggcactccagcctgggcaacataatgagactctgtctcaaaaaaaaaagaaaagaaaaaaagaagtgcattgtttaattttcaaatatttgggggtttttttcttgatattatatgtgaatgaattctagtttaattccattgaagtctgacaaataccctgcaagatttcaattttttggttttttttgagatggagtcttggtctgtcacccaggccgtagtgcagtggtgcgatcttggctcactgcagtctccacctcctgggttcaagcaattctcctgcctcagcctcctcagtagctcggactacaggcacataccaccatgcctggctaatttttgtatttttagtaggtatggggtttcaccacttyggccaggatggtctcaatctcctgacctcatgatccacctgcctcggcctcccggagtgctgggattacaggcatgagtcactgcgcccggccttttgtttgttattttttgagatgcaggtttgctcttgtcgcccaggctgcactgcagtggcatgatcttggttcattgcaacctccgcctcctgggttcaagtgattctcctgcctcagcctcctaagtaggtacaattaaaggcatgaggcaccatgcccggctaatttttgtattatttttattattttttgagacagagtctcgctctgttgcccaggctggagcgcagtggcacgatctcggcccactgcaagctccgcctcccaggttcacgccattctcctgcctcagcctcccgagtagatgggactacaggtgcccaccaccactcctggctaattttttgtatttttagtagagacggagtttcaccatgttagctaggatggtctcgatctcctgacctcgtgatccacccgcctcagcctcccaaagtgctgagattgcaggcatgagccaccaagcctggccctaatttttgtatttttaatagaaatggggtttcgccgtattggccaggctggtgttgaactcctgacctcaggtgatccgcccgcctcggcctcccaaaatgctgggattataggcatgagctagtgtgctgggctagattttaatttttattgaaattttttgagatttattttatggaccagcacatgacttatcttggcgaacatattgtgtttacttgaaataatgtgtattttgcaatatctgagtgagtggtatacaaatgtccatcagatcaagttggtagtgggttcagatgtatgtctttagataaatctatttttgtctaattctatcattactgagaaaggagtgttaaaagctcaactaagacttgtggatttctccatttttttctctttaattttgatcatttttacttgatatatttcgaagctctgttgtttagcacatacatacttatgattgtaatatctttctgatgaacttgcagttgtatcattttcaaatgtccctctttatctctggtggtacactgtcgtaaaggctgctttatttgatattaaagtagcctcaccagctttcttatgcttagtgattgcataatgcttccatttccatccttgtttttgcagcctatctatgtttatatattcagcgcatatctcttgtagacatcatataattaggtcatgtttttctgtccaggctgaaaacatctgtcttttatttttattttatttcttttatttattttattttatttttttttgagatggagtctcgctctgtcacccaggccggagcacagtggagcgatcttggctcattgcaacctccgcctcctgggttcaagtgattctcatgcttcagccacccaagtagctgggattacaggcacgcgccaccatgcctggctaatttttgtatttttagttgagaaagggttttaccatgttggccagggtggtcttgaactcttaggctcaagcagtcctccccctcagcctcccaaagtgctgggattacaggcaggagccaccatgcatggccaacttctgtcttttaattggaatctattcatcttttgagtttaatgtaattattgatatgtttgatttaggtctacaatytcaccattggttttttgtttgtcccatcatttttttgttcttacctacttttgggtcaattgaatattttttagaatttcattttaatttatgtaccatttttaattcagaaaagtaatttcaggccaggcacaatggcttatgcctgtaatcccaggactttgggaggccggggcaggtggatcacctgaggtcaggaatttgagaacagcctggccaacatggtgaaaccgcgtctctactacaaatataaaaattagctggttgtggtggtgcacatctgtaatcccagctactcaggaggctgaggcctgagaatggcttgaacctaggaagtagaggttgcagtgagccaagatcgtgccactgcactccagcctgggtaacagagcgagactgtgtctcaaaaaacaaaacaaacaaacaaacaaaaaacaaagaaaagtaacttcaagaaaatctcatcaattcagccagcaattttgtttattttcatttgtccttgcaggattatgaaagcccttgcaaatgctggagtacctgtccctaacgttcttgatctctgtgaagattcaaggtaaagttcagatgtttttgctattgcactttcaagctacaggagagaaaagcccatatgctaacacaaattccaatttgttaaagacaaataaaatttgggtaggagggaaaagaaactttatcacaacctctcccagaagttctcagatatttaagttatcctgcaagataagtatatgcctgctttagggataattggtagaaaacatcttttttaacattcaaaaaatacatattaatctagtttcatgttgcttgtctttatttatttttttaatcagagtctttctaaactgttttgttttgtttttttgagacggagtctcattctgtcacccagactggagtctcattctgtcacccagactggagtccagtggcctaatctcggttcactgcaacctctgcctcctgggttcaagtgattctgctgcctcagtctcctgagtagctgggattacaggtgccccctactatgcccagctagtttttgtaatttttgagtagagacagggtttcgccatgttggccatgctggtctccaactcctgacctcacgtgatccacccactttggcctcccatgatgctgggattacaagtgtaagccaccgtgcccggccctaaactatttatttatttatttatttatttatttattttttattgataattcttgggtgtttctcacagagggggatttggctgggtcataggacaatagtggagggaaggtcagcagataaacaagtgaacaaaggtctctggttttcctagcagaggaccctgcggccttccgcagtgtttgtgtccctgggtacttgagattagggagtggtgatgactcttaacgagcatgctgccttcaagcttctgtttaacaaagcacatcttgcaccgcccttaatccatttaaccctgagtggacacagcacatgtttcagagagcacagggttgggggcaaggtcacagatcaacaggatcccaaggcagaagaagttttcttagtacagaacaaaatgaaaagtctcccatgtctacttctttctacacagacacggcaaccatccgatttctcaatcttttccccacctttcctgcctttctattccacaaagccgccattgtcatcctggcccgttctcaatgagctgttgggcacacctcccagacggggtggtggccgggcagaggggctcctcacttcccagtaggggtggccgggcagaggcgcccctcacctcccggacggggcgggtggccgggcggggggctgacccccccccacctccctccyggacggggcggctggccgggcagaggggctcctcacttcccagtaggggcggccgggcagaggcgcccctcacctcccagacggggcggctagccgggcggggggctgacccccccacctccctcccggacggggcggctggccgggtggggggctgaccccccctcctccctcccggayggggcggctggccgggcagaggggctcctcacttcccagtaggggcggccgggcagaggcgcccctcacctcccagacggggcggctggccrggcgggggggctgacccccccacctccctcccagacggggcggctgtccaggcggggggctgacccccccacctccctcccggacggggcggctggccgggcggggggctgacccccccgcctccctcctggacggggcagctggccrggcggggggctgacccccccgcctccctcccggacggggcggctggccgggcagaggggctcctcacttcccagtaggggcggccaggcagaggcgcccctcacctcccggacggggtggctggccgggtggggggctgacccccccacctccctcccggacrgggcggctggccgggcggggggctgaccccccgacctccctcccggacggggcggggggctgacccccccccccacctccctcccggacggggtggctgcccggcggagacgctcctcacttcccagatggggtggctgccgggcagagaggctcctcacttctcagayggggcggctgccgggcggagggcctcctcacttctcagacggggcggttgccaggcagagggtctcctcacttctcagacagggcggccgggcagggacgctcctcacctcccagacggggtctcggccgggcagaggcgctcctcacatcccagacggggcggcggggcagaggcgctccccacatctcagatgatgggcggccaggcagagacgctcctcacttcctagatgtgatggcggccgggaagaggtgctcctcacttcctagatgtgatggcggccgggaagaggtgctcctcacttcctagatgggatggcgtctgggcggatacgctcctcactttccagactgggcagccaggcagaggggctcctcacatctcagacgatgggtggccgggcagagacgctcctcacttcctagatgtgatggcgtcacttcctagatgtgatggcggccgggaagaggtgctcctcacttcctagatgggatggcggcggggcggagacgctcctcactttccagactgggcagccaggcagaggggctcctcacatcccagacgatgggcagccaggcagagacactcctcacttcccagacggggtggcggccgggcagaggctgcaatctcagcactttgggaggccaaggcaggcggctgggaggtggaggttgtagcgagccaagatcacgccactgcactccagcctgggcaccattgagcactgagtgaacgagactccatctgcaatcccggcacctcgggaggctgaggctggcggatcactcgcggttaggggctggagaccggcctggccaacacagcgaaaccccgtctccaccaaaaccagtcaggcgtggcggcgcgtgcctgcaattgcaggcactcggcaggctgaggcaggagaatcaggcagggaggttgcagtgagctgagatggcagcagtacagtccagcttcggctcggcatgagagggagaccgtggaaagagagggaggggagaccgtggaaagagagggagagggagaccgtggaaagagagggagagggagaccgtggaaagagagggagagggagaccgtggaaagagagggagagggagaccgtggggagagggagagggagaagactattttaaacagctttgtaacatgctttttgagtgtctcttctttcctaatgttttaattatgtaacatttgaaaccttcagaaaaggtgaaagaagaaaaactaatacaatgaatacctgtttacacttcatctagatcaaaaattaaaacattgttaacattttgccacatttattttctgtatatgtgtgtgtgtatacatgtatacttttaacatgtagataatgattttttttggctgaaccttttgaaataagtttcagacagcatgcatctctcaagaataaagacattgaccgggcatagtggctcactcctgtaatcccagcacttaaggaggctgaggcaggtagatcacttgagcccaggagtttgagaccagccagggcaacatggcaaaaccccatctctacaaaaacaaacaaaaaattagccaggcgtggaggtgcacacctgtagtcctacctacttacccggaagattgtggtgggaggatcacctgagcctgggaggtggaggctgcagtgagctgtgatcacatcactgcactccaggctggatgatagagtgagaccctgtctttttttttttcctttcttttcttcttcttcttttttttttgagatggagtctcactctgttgcccaggctggagcgaaatggcgcggtctgggcacactgcaacctctgcctcctggattcaagcagttctcctgccttagcctcccaagtagctgggattataggcatgtgccaccacacccggctaatttttgtatttttaatggagacggggtttcgccttgttggccaggctggtctcaaactcttgacctcaagtgatccatccgcctcggcctcccaaagtgctggattacaggtatgagccactgcacccggccgacattgtytttcataaccacaacaccagtatacctaactaacaattatttaataataatactgaatatctaacccatgttcaaatttccccaatccaaaacatcttttgtaataatttttcaacttgaaacatttgtaatggtaggattttcaaaacaattttttagagtagtaaactggaggctgaggcagatggatcacttgaagccaggagtttgagaccagcctggccaacgtggtgaaaccccgtctctactgaaaatacagaaattagctgggcatggtggcgctcacctggagtcccagctactttggaggctgaagcaggagaatcatttgaacctgagaggcagagtttgcagtaggccaagatcgcaccactgcactccagcctaggtgatagagtgagactccatctcaaaaataaataaataaataaatagagtagtaaactgtttgctagtaatgaccaaaagatggattagtgacatgtcattgggtcaccttagtactgctgggtggtatatacaccactcataccaccaaaaaatgataaaaataacctcaataacaagaagggatacttattgaacccttattggaaccagagaccatgtcaggcactctgtatgtttgttccctaattcatttctttttttaagtaacaaataccctggaagctcccttaattcttgcaattaccctttgaagtatgtatgttttacagattaaaaaacaacaacatggctgggtgcagtggctcacgcctgtaatcccagcactttgggaggctgaggcggatggattacgaggtcaggagattgagaccatcctggctaacagagtgaaacaccgtctctactaaaaatacaaaaaattagctggttgtggtggcacatacctgtagtttcagctattcgggatgctgaggcaggagaatcacttgaacccgggaggcggaggttgcagtgagccaagatcgtaccactgcacttcagcctaggcaacagagcgagactccatctcaacaacaaagctcagagaggtttaataagtctctcagggtcactcttcaastaagagcagagttgggatttaaacctggttccaaccaggtgcagtggctcacacacgtaatcccaacactttgggaggctgaggcagtcagattacctgaggtcaggagtttgagaccagcctggccaatatggtgaaaccccatctctactaaaaatacaaaaattagtcaggcgtggtggcatgcacctggagtcccaactatttgggaggctgaggcaggataatcgcttgaacccaggagaaggaggttgcagtaagccaagatcgcgccactgcactccagcctgggcgacagagcaagactccatctcaaaaaaataaataaataggccgggagcagtggctcacgcctataatcccaccactttgggaggccaaggcgggtggatcacgaggtcaggagatcaagaccatcctggctaacacggtgaaatcctgtctctactcaaaatacaaaaaattagccgggcgtggtggcgggtgcctgtagtcccagctactcaggaggctgaggcaggagaatggtatgaacctgggaggcggagcttgcagtgagccgagatcgcgccactgcactccagcctgggtgacagagcgagactccgtctcaaaaaattaaaaaataaataaataaataaacaaaaaataaaaacctggttcggtgtgactccagaggtccttctctgagccttgctgcttgctacattattacactttgaatccattcctgtggcttacacaaatgaaccagggagaagagaaaagcatgctgtccaagaagcatagatgggtgtgcatgtgtgtgtgtgcacgtgtgtatgtatatgtgtgtgtgcatgtatgtggatcgatccattgcaagagaggatacttctaatgcactgtgcttatgtgaaaggaaaaaggaagtatccagtgctctgggtctgaactcttcaccagctctcaacctgtatacccagggaaagtgacaaagaatagggtcatgactaacagyctgccacattatgactctgatccctgaaaccccttctgtgttcctcccagtgtcattggcacccccttctatgtgatggagtactgcccaggtctcatctacaaagacccttccctgccaggcttggagcccagccacagrcgagccatatacactgccatgaacacagtcctgtgcaaaattcacagtgtggatctgcaggctgtgggacttgaagactatgggaagcaaggtgagcaggaggccacgtctcccatgctggttgtttcatcactagtgcttctgcttttaggatctgaatcgttttgggtcgttttgagtattagcacaccaagcgtaaggcagacttagcttcttccttggaaatccagtttagttttaatggaggtgttgctgacttaggcatttgggccttcaataaatccctttatgaactacacagtctttcttccctgcaacttttttttttcattttttctttttttcccttaaatattctgctatccaattccctgcaacttttatctcactagaccatttaaattttttttctgatactgaccataggtatttaaaatgtatttttctccgttttttaccctttcccctaaatattcttttcaacaggaatatatgtattttttgagatgggggtctcactgtgttgcccaggctggtctcaaacttctgggctcaagccatcctcctgtctcagcctcccaagtagttgggactctgggcatgtgccaccgtgtccagtttcaacagggatagtttttttgtttgtttgttttttgagacagggtctctctctgtcgcccacactggagtgtagtggtgtgatctcggctcactgcagcctcaacctcttgggctcaagcaatcctcctgcctctccctcttgagtagctgggactacaggtacgcaccaccatgcccagctaatttttgtatttttagcagagacaggtttttgccacrttgcccaggctctacccaaactcctgcgctcaagtgatttggcctcccaaagtgttgggattacaggcatgagcctctgcagccagccctcatgtagttcttaccacatgccaagaatagttctaagggctttacatattttattctcccaacagctctatgaggaccatctcaagatgaggaaactaaagcatagagatgttaagtaacctgcctgagatcacagagctagagaacaacagagctgggtttcatagcctggcagtctggctccagggttcatgtgctcagctaaccactgttgtttagccaaaaagtgatttatgaaaggctattaggaagcacagaagatctttttttttgagatggagttttgctcttgtcacccaggctggagtgcaatggcgcaatctcggctcacttcaacctccgcctcctgggttcaagcgattttcctgcctcagcctcccaagtagctgggatgacaggcacccaccaccacacctggctaatttttgtatttttcagtagagatgcgctttcgccatgttggacaggccagtctcgaactcctgacctcctgcctgcgttggcctcccaaagtgctgggattacaggtgtgagccaccatggccggccacaaggtctttaagaggaccagagatcatacttggagaccatatagctaggaacagcacccagaccacactaatccagccaaagagctggtgacttccaccttggggcagcaggagcatcatgtgggaaattctccagtcataggaacgtgttcaaagacactgcaccacccrgtgcagagcatgacaaagggtttcactgcactggtttttttttccgctactttcagaggttgctgaaattgcacaccaagttctaatcctrtttcccgcaggggactatattccacgccaggtacgaacctgggttaagcagtatcgagcttccgaaactagcaccatcccagccatggagaggctgatcgaatggctgcccctccatcttccccgtcagcagaggaccacagtggtgcacgggracttcaggtagatgtggtggcagrgagagctgaaaaatgacagcaaggatgctccaagggggaattgagcaattggtcttggtgcaatttacagctgggaattattcctattacaaagcacctgtctgtgtgtggccttttcaggcagggtttctcagctctggcactgtgacatgttgaattggataagtttttgtggtgggagctactgtgcattgcaggatgtcaggcatcatccctggcctcaacccactcgatgacagtagcacccctccccacagagtgtgacaaccaaaratcttcgcagacctggtccagtgttcccagggagggcagcattcctctgttgagacccactgtttgaaagtaaggcagagtctatggccataccaccctgaacaggcccgatctcatctgaaagtaaggcagagtgagggtgccactcacctcccaagaggcctggggatggacattctcactgggtgtaatgaaaggattgaaagagagtgacagggtctctgggggtatgtgatgagtctgtagcacggctaaaatgggaacttcagtatgcctggcgtctggcggcagtgtctagctttatcttatcatctcttgctgtgaaaactgcccgttaggtacttttatagggtagtgtttatagtgttttctgcttcgcagcacctggagacctgcttttgatgcaagcatgccttatttggcttgtcttcttgcccatctggggactcaggccttttattaaacaagactagacagtgaaggctaattttaaagacatttccgtttcttttttttttttttttagacatcgtctcactcagtcgcccaggctggagtgcagtggcgtgatctcagctcactgcctaccccacctcctgggttcaagcaattctcccgccccagcctcccgagcagctgggattacaggtgtgcaccaccatgtgtggctaacttttgtatttttggtaatccaaaaatacaatacatttttagtaatacaaaaatgtgagatggggtttcatcatattgatcaggctggtctcaaactcctgccctcaagtgatctgcccactttggcctcccagagtgctgggattataggcatgagccaccatgcccagccttaaagacatttctttgccttccaaatttgattggcctctcttcattggcttgaccggtgtccctcgctcccggcttcttccgttagccagccacctttggggatccccctgggtctgagagtggacagctgagctttctttgtcatgtggtcatcacgggagcttgaggaacctgcttctgcatcagagactgatggggccaagtgcttcccccacactgccttgaacgtggcatgcagttgggctgcatttgaccccctcctccatcttctttctccacttgggattctagagcacttgcctgacaacactttccttgccagccattgccatgtatttcctttggcggggaagacctcaggtggcctttgtgtcaccagcccacaacagctgctccgtggaccttgtctttgcttctcttggcacctcaacaatccacgaatgtgatcaagtatacagcaggcaggagatatccagtgcagtctgagcaccccctcccctagctatagtgaagtatgatgatcatttaggatgttgcctccaggaaaggcatcctctgattttagagagcgtgctgctgcttattgatcaacacagtcagagatagttctgtcttttgatggatagaagaacatttcttgctagtggagtgaatcagcggtggtgggagcataaactgctgcagctactttgaaaagtagtaggcagtggccaggcacggtgactcaagcgtgtaatcccagcactttgggaggcsaaagcgggcagatcacttgaggtcaggagttcgagaccagcctggccaacatgccaaaatcccatgtctattaaaaatataaaaattacctgagtgtggtggtgcccctgtaatcccagctactcgggagggtgaggcaggagaatcacttgaacccgggaggcagaggttgcagtgagccaagaccgcaccactgcactccagcctgggtgacagagtgagactccatctcaaaaaacaacaaaaaaagaaaagtaatgggcagtaacatggaagatgggaatatgctacaacccatcgtttcttgtaaagaagcatctgctgcagctttgcaccaagagactcaggtgaagatgtttgttttggtcatgcttgtaattataatacatgataaataaagtgtagtttggccatatgttggaattctatttagtgagtaaaataaaccaatttgctgtacataagtcataagtctcaaaaaagataatcgaagtagaaaaaagtttcaaaagggtaatatatcatttatgaaaatttaaaaataattgaaagaacactatatgtggtatataggtacaggtatagataagagaaatatagaaatgtctgagactgatatataccaacttcagggtagcagtaaatctcatttttaaaaaatctgaagcaaatgtaacaaaaaagcacgtacaatatctgttaaatctggaaggtggacacatgagttctgtcattatgtcattctctgtatttttctgcatgcttgatgtttactttttcttttaaataaagcatgcattacagacagccctggcaggaaacagaaagcatgaaagaggctatctggggagagttcaatatagggttatttagttcaatatagcgtggtttagaggaaccgctgaagaacagcgtggagtcccggggccagtaacagtgaggggtcagtctgacagggcaagcatgtgctgtggttattgctactctacaacaaactttgtcagaactgagtggctgtcaacaacgacagcagtcattttgcttatgaatctttgcagtctggggacaggacagcttatttcaaagtagggcggctgtcgggtggggctggatcttctgaagacttgctagcatgctggccctgggcagagaagatattaacagccgggctccttgggcctctctttctgtctctttgtggttcccacatggtctctccagcatggcaacttctgggtaactggactttttttttttgagacaggatcttgcactgtcacccaggctggagtgtagtggcaattcataggctggaacataactcactgcagccaccaactcctgggctcagtgatgctcccaccttagcctcctgagtagctgggactacaggcgtgcactaccacgctcagmtaatttttaaatttttttttgtagagataggatcttgttatgttgcccgggctggtcttgaactcctgagcttaagcagtcctccgaaaatgtggggattacaggcatgaaccattgctctcagccctggacttcttacctgggggctcagggctccaaaatagtgtgtttcaagagacagagggctgggcagaagctgtatcacgttttctgacctagtctagtttcaggaatccctcagcatcacttccacgtgtcttatatctgttagaagcaagatgcttcactgggccaagcattagactctaccttttgtgggaggagtgtcaaaggatttacagatctgttttaaaaccatcacagggagggagtaattcccggaacccagagaggctagctctctggggaaggctgcagagaaggagctggggaaataaataaccaggccctttcccatctcctgcttttgattggctgagtccagctggaagccagagggcaagggagcctttggagcacacagcccagggagctcaggcacccrggcacagaggggatgggagggtggggagccaagyctaaagrgcaaacagaccacgcagaatccaccctagcyggcagttttcttagtgctgtctctattcctcctgcgacttttcaggctygacaacctggtgtttcatccagaagagccagaggtgcttgctgtccttgactgggaactttctaccttgggcgacccccttgctgatgtggcctacagctgcctggctcattacctgccatccagttttcccgtgctgagaggtaggaactgctgctggaggatagtgggggagcaagccagttctccaagcatttgggagcaaactcagctgaagtagtccgtgattgggcgggggaagtgaaagtgaggtcctggtggttctggtgggaaacataactagaatgcagtcctgtcacatttacgggaaagtggatataggatgtgttttaagtgaaaagtatgcctgtataggtaccgcttatgcttttacacagctaacttctatttagggttttaaattaaaaacacattcattgtggctgggtgtggtgtctcatgcctgtaatcccagcacgttgggaggccaaggcgggtggatcacaaggtcaggagttccagaccagcctggccaacatggtgaaccctgtctctactaaaaatacaaaattagctggacgtggtggcgtgtgcctgtaaccccagctactcgggaggctgaggcaggagaattgtttgaacctgggaggcagaggttgcagtcagctgagatcatgccattgcactccagcctgggcaacagggcgagactccatctcaaaaaaaacaaaaacaaaccacatttattgtgaaaatactagagccaacagatagcaacaacaacaaaacagttaaaatcattagtagtcccagagataaccatttgctgacatttcagtatctatccatgtcatcttttcttctgtgtgtatatgtacatttcctaaaacaaaacaaaaatgtaacatgatctaatggcatgctttttttcacttcattgtatactgtagacatgttttcatgacattaagtatttcttctatagcataatttttaatgagagcatataattttattgtatagaattaagggaagacggccgggcgcggtggcccacgcctgtaatcccagcactttgggaggccgagacgggtggatcacgaggtcaggagatcgagaccatcctggctaacatggtgaaaccccgtctctactaaaaatacaaaaaaattagctgggcgtggtggtgggcacctgtagtcccagctactcaggaggctgaggcaggagaatggtgtgaacccgggaggcggagcttgcaatgagctgagatggcgccactgcactcgagcctaggcaacagagcaagactccatctcaaaaaaaaaaaaagaattaagggaagacatttgggttaattyctatttagatatttaatttgtttccaattttttagtattacttcccctacttccatgaaaaaaaggcagtgaacatccttgtagtaatatatttgcctatatataaggtatactcctaagattaatacctaggaatggaatatattacatgcttctaaatcatgaaaatgtcacaactggaggaaataagtgaattttttttttttttgagacggagtctcgctctgttgcccaggctagagtgcagtggcgcgatctcagctcactgcaagctccacctcccaggttcacaccattctcctgcctcagcctcctaagtagctgggactacaggcacccaccaccacgcccggctaaatttttgtttttgtagtagacrtggggtttcaccgtgttagccaggatggtctcgatctcctgacctcatgatccgcccgccttggcctcccaaagtgctaggattacaggcgtgagccactgcgcctggcccgtgaaattattttatttgctataattatcattttcataatttggtgagatctttttatttttatatttatttatttatttgtttatttgtttatttatttttgagatggagtctccctctgtcactcgttttatttatttttgagatggagtctcactctgtcgcccaggctggaccacagtggcgcaatctcggctcactgcaacctctgcctcccgggttcaagcgattctccggcctcggcctcctgagtagctgggattacaggcgtgtgccacaatgtctggctaatttttgtattttcagtagagacagggtcttcaccatgttggccaggctggtgtcgacctcctgacctcaaatgatctgccctcctcggcctcctaaagtgctgggattagaggcatgagccactgcacccagccaattgtttttttttttttttttttgagatggagtcttgctctgtcacccaggctggagtgcagtggcgtgatctcagctcactgcaacctctgcctcctggattcatgcaattctcctgtctcagcctccctcccaggtagctgggattacaggtgcacgccaccatgcctggctaatttttgtatttttagtagagacagggtttcaccatattggtcaggccggtcttgaactcctgacctcaggtgatccacctaactcggcctcccaaagtgctgggattacaggcatgagccactgtgctcgacctgagatcgctctttccatatcatttttgatcaaatgactggttgaagataatatgcatccacccttaactgtggccagatggaattggaagctcccattccttcctttactgccagttgagtctgaaacctgtaagagccaatttgtgaataatgacttcatgcctggatccccagccatctaagggagcaagagccaatgcaggaataagctaacccatggaactggtcgtgaaactaatttgcaagggacatggcgattttcagaatttaaatatttgccagccacaggggcgtgtcacgtcagtgactacccatgaatggctctgtctttctcgcaggtattaatgactgtgacttgacacagctgggaatccctgctgcagaggagtatttcaggatgtactgtctccaaatggggctccctcccactgagaactggaacttctatatggctttttcctttttccrtgtggctgsaatcctacagggagtctacaagcgatcactcacaggtaatgggatggcwgccctgaagagccactgcggggtgagtcacagcaaggaccgtgcctccacctggaaaccctctcagggccacagaggctttggagagaccgatttggccaggattctctgaggttcagttaatctaaccatttgtccataaatattttctttacaatatttatttatttattatttgtttttgagacagggtcttgctttgtcaccctggctggagtccagtggtttgatcctggctcactgtaatctctaccttctgggttcaagcgattctcctgcctcagcctccagggtagctgggactacaggcctgcgccaccacgcctggctaatttttttttgtatttttagtagagatgaagtttcaccatgttggccaagctggtctcgaactccgggcctcaagtgatccgtctgccttggcctcccaaagtgctgggattacaggtgtgagccaccatgcccagcctctttacaatatttaaacttgttttttaattattaaagtaatgcacaaagaaatttttccagttaaagcattcatgcacatgatcaaaatttggtcatatagaattatgtaaaattgtatctcacccttttcaacaccattcctcaaagataaatgttactgttaagagtttcctgggccctccagtttttctgtttatctgtcttctctctctcctcctacttttacacaaatgtgatcatcctatgtgtatttttcggtactttgattttaaaattttgtaagcttaagaatttctgtgaaatatgtgtgtgaccatttgcatatttaacaactatatgaggcaaatttcttggtgtgtgtgtgtgtgtgtgtgtgtgtgttgagacagtttctcactctgtcgcccaggctggagtgcagtggtgcgatcttggttcactgcaacctccacctcaccagctcaagcaattctcatgcctcagcctcccaagaagctgggattataggcacataccaccatacccgsgtcatttttttgtttgtttttagtagagatggggttttgccatgttggccaggctggtttcgaactcctgacctcagatgatccatccacctcggcctcccaaagtgctgggattacaggcatgagccactgagcccggccagtccccaagtctttaggtaaaacccctgtggtctttgacaacttccttgctcgctagtatgacaaaatgttccaggttcatcttgtctatccagcctacccaacatggtgaaactgtgtctctactaaaaatacaaaaattagccrggcatggtggcgggtgcctgtaatcccagctacttgggagactgaggcaggagactcacttgaacctgggacggggaggttgcagtgagccgagatcgtgccactacactccagcctgggcgacaagaatgagactctgtctcaaaaaaaaaaaaaaaaaaagacttgggagccaacctgaacaggctcccacttgctaacaataggaaactttgggcatcaccaaggatgatagctgaaatggatgaaacacatcaggtatgtttaaatccatgagtagtagccgggcatggtggctcaggcctgtaatcccagcactttgggaggccaaggtgagcagatcacttgaggttagggattcaagaccagcctggccaacatggtgaaaccacatctctactaaaaatacaaaaattagccaggtgtgatggcgggcgcctaaaatcccagctactcaggggactgaggcaggagagagaatcacttgaacccagggggcagaggttgcagtgagctgagatcgcgcctgtgcactgcagcctgggtgactgagcaagacactgtccccccaaaaataaaaattaaataaataagtccatgagtagtgatacaaaaacaaagagacaaagtctcattgatgacctcagaggttgccaggaaagcaacttattattctgaaaattggaaaatggggtgggggggtggggaatcaagcatttgtcctgtctttcctgtacaaatgatactgcaggctatccaaataatcaatgagggaatgtttctctctagagaagtatcctggacagaataatatagaatttgcatatcaccaatttgcaactcctaatgcattaatggatgtgggcaataagcttcaatgaaagccaacaccactgagagacagacagccagacattatatacctcctgatgcttccctcaaaagttacactgactctgcccaggtctccagtgctagctgccaactcatgggaaacacagggttcagagggacatgttcagcagcaccctgggcacagcactcacaaaatccagattctggaaaacatcacagggcaaacaactcagtttcttcaaacacttacatttcaaggggaggaaaagggtgaaaaaggaacctgtagattgagagagacttaaaagaaacatcaggctgggcgtggtggctcacgcctgtaatcccagcactgtgggaaaccgaggtgggtggatcacctgaggtcaggagtttgagaccagcctggccaacatggggaaaccctgtctctactaaaaaatataaaaattagccaggcctggtggcgggcacctgtaatcccagctactcgggaggctgagataggagaattgcttgaacccaggaggcggaggttgcggcgagccatgattgcatcaccgcagtctagcctgggcaacaaagtgagactgtctcagaaaaaaaaaaggtggggggagcggggagagacttaaaagatacgttagccagttacagtgttgggaccttatttggatcctttcttgaacaaattatttggaaaaaattttgatgatagtcactgaaacttgaattctgagtggatagtcgatgatatgaagaagttaacagttaacgattttttaagggtaataatagtattgtgggtttttaaaaaaacatttgtttttagagttttgaaagaatcctagatgagatatttgggatttactccaaaaaatccaggacagtgggagtggggatggcagggaatgaaaccagactgggctggcatcgatcattgcggaaggcgagcagtagaacccgtaggcttgttattctctcctctctactcctgtgtgtctttgaaattttccaaaaggaggccagtcatgatggctcacgccggtaatcctagcacactgggaggccgaagtaggtggatcacctgaggtcgggagtttgagacccctggccaacatggtgaaaccccgtctccactaaaaatacaaaaattgcctgggtgtggtgatgccgcctataatcccagctacatgggaggctgaggcaggagaatcacttgaacccgggaggcagaggttgcagtgagcagagatcgtgccactacactccagcctgggtgacagagcaagactccatctcaaaaaaaaaaaaaaaaaggccaggtgcggtggctcatgcctgtaatcccagcactttgagaggccgaggcggggggatcacgaggtcaggagatcaagaccatcctggccaacatgatgaaaccccgtctctactaaaaatacaaaaattagctgggcttggtggtgtgtgcctgtaatcccagctactaggtgtctgtaatcccagctaactagggaggctgaggcagatgaatagcttgaaccagggagtcagaggttgcagtgagccgagattgcttcactgttcactccagcctggtgacagagcgagactccatctcaaaaaaaaaaaaaaaaaaaagwaaagaaaaagaaattttccaaaagcaaaacttaaaaacaaaaggcaaggagaaagaaggagaaaggaattcatcatgggatttgctagtgctgatggagtgtttagctttgcagtcagtgacaccccaagcttgctggcagcctgtgttctcagccaggttgccagagtcttctgagagaagcagttgcagtaggggaattgatcattcattcccaagtatatgagcctctactaaaagccagcactgtgctaggtggtcctggagatacacagtcatgagaaaaactgtccggagaaaaaccagtacccagagaatttctagtttaactgtacctggtctgataagcaggggatgctrkaagcaggaatttctggaaacaatattttccctcttttaggaaaatacagtatcagctgtaagccactatttcccattttttttatagttttccaataaacactaaccagaaatatttacttaaacagaatggctgctaagtccttatggtgatgaatagtcctggtcacctctgatatttcctagccggctgccaagttttctccctgctctgctccagtgacctgggaaaagcttaatagactgcccattttagagtctccacactgagtgtcctcagcctgtctctcaggaagccctttgacatgtttttaagatcctgtgagccatcgttgtggcttctggtttctctcggcccagagctaaaacaccccacctgtttgccaccagacagaaaaatgtctgtttgttcaggcctttattcctcttatcttactgtgcactcctttccctccctctgggaagccagccagacacactgaggaaatggcttagttttctcaygtaaaaacaacaaaatccattttttgaaagaataatataaaaacgtatgatgaatggggaaaaaaccaactatacaaacataaatattacttctgtacatttgtcttctacaattagctttaaaatcatttttgtttgaacagctgagatatttggtactggccaggaaaactggagcttagagaaggggtatctgtttccaagacattctctctatggtgtcatttacaaaagacttcaaatcagcattagattgggaaggggatgagagagaccagagcccagtgagcagaagattaacagtatgtacctgcccagcccatgtgtccttctccttccttaataagtgggtgcagaaattagatttctggtagatggccactgaaattctataaagtgcttatgactgcaagttaagtggacaccagtgatgtggtctcttctgctggaactacattttggaaaatataccagaagcaatagatctaaatcaatccaagcttatacaagtgacttttttcagggacaaagtagcagtctcagagtgggagccaaccaaatagaagaaaattaagaatacacctcttactctgttagaagaagaaaatccttatgaataataaggaacataagggagtatctttcccttcaatgtgctgtgtgcagtccgaggaataaggaataagcccccactgtgtgtctgcaaggaagaggctatctggtttctgactgacttccctgggttaggttcatacctagcacccagaaggtcctcagtagagacctattgaggtccagtaggctaactctctgcagggtagcaaagaatttgctctgagtttgttcctaactctgtaaggaatagtttaaactatctttaacaccaaagctgcatgaaaatggctgtctcagctgggcatggtggctcatgcctgtaatcccagcagtttggtagactgagacaggaggattgtttgaggccagaagttcgagaccagtttgggcaacgtagtaaggccccatctcttatttaaaaataaataaaatatttatttttttgagacggaattttgctcttgtcacccaggctggagtgcaatggcatgatctcggcccacggcaacctccacctcctgggttcaagcgattctcctgcctcagcctccccggtagctaagattacaggcgtgcatcaccacacctggctaaattttgtacttttagtagagacagggtttcaccatgttgcccaggctggtctcgaactgacctccagtaatccacccacctcagcctcccaaagtgctggggttacaggcgtgagccaaagcacccagcctaaaatgaaatcatttaaaaaaagaaaatggctgtctctttagaactatcaatttatccatttattgggtacagtctcttggggacatggaagtgctagaagtaatccaggagagctggctgtgaaaaagttcactgtgaggagacattgtacacatagcaatctggatgtgtctcagatgcagggctcagagtgatggaggccatactgaaaaggccacatgctgagtgacatatgtatttatgggacatcctggaagagacagactacagaaacagagatcagtgggtgctggggatcaggggggcaggggttgagtacaaaagtacactggggaaatttccagatgatggaaatattctgtttttttttttttttttgaaatggagtctcgctctgttgcccaggcaacctccgcctctcgggttcaagtgattctcctacctcaggctcccaagtagctgggactacaggcatgtgccaccatgcctggctaatttttgtatttttagtagagacaggtttcaccatgttgaccaggctggtctcaaactcctgacctccggtgatccacccgcctcagcctccaaagtgctgagattacaggtgtgagccattgcgcctggccgaagtattctgtatcttgatggcaatggtagttacccaactatggatttgttaagacttgcagagttctacattaaggaggtgtatgtacaccactcctcaatttttttatttttatttatttatttttttgagatgggtgcctcactctctcccaggctggagtgcaatggcacgatctcggctcactgcaacctctgcctcccaggttcaagcgattctcatgccttagcctcctgagtagctgagattacaggcacacaccaccatgcctggctaatttttgtatttttagtagagatgggggtttctccatgttggccagcctggtcttgaactcccgacctcaagtgatccgcccacctcagcctcccaaagtgctgagattacaggtgtgagccaccgcacctggccaccttaattttttttaatggggaaaaatatgtttgtaaaaaaagtcttgatgcacattttacaagaagaaagagacgctgtgagagccaaatagtgagctgagtgatgctggtgttgattccctccagagacagtggtgtctagaagttggctcttcctttagtcagttgtggcattgctgttatcaattttgtagcaagggtggtctaggatgcaggacttcttatagcccactggcaacggcagaggtgatctggggtgttactgattaaatgtagtcttttaggaaagcagaratcaagagcagggagcaggcagacctaagttggactctggcccccagccccctaacttccagctcgtccaagtcacctccttctctaagactcagttktcttgcgtgcaaagtgcaggtgaaagcagttgtattgctttggggattcagtgagctatagtggctcttagcacagtgtttggtacttagcaagtgctcagcaaatggcaatagctgctgaagtgacagtgtcatcacatgttaacatccctatgatgggtcgtgtgggagtaatcactgtttttctttgattctgcttagggcaagcaagctccacatatgcggaacaaactggaaagctgaccgaatttgtgtctaacctggcgtgggatttcgcagtcaaagaagggttccgggttttcaaagagatgcccttcacaaatccgttaacaaggtcctaccacacgtgggccaggccccagtcccagtggtgccccacaggcagcaggagttatagctccgttccagaagcttccccagctcatacctcaaggggaggtctggttatctctccagagagcctcyctccacctgtcagagagctgtatcaccggctgaagcacttcatggagcaacgtgtgtaccctgcagagccagagctgcagagtcaccaggcctcagcagccaggtggagcccctccccactgatcgaagacctcaaggtaaagcagccatggtgaggtggtaagaccccaataccatggcataccctccccgaccccaccgggctcacctgaaccatcccaggcagtgaagatacaggagctccgagttgaatgatctttgcttccatcgtctcagaaagagccagctcttcatgactcagtttccatctcttgctcttgctgtgcctgtgtcacaggcagatggctcaggtgtgactgcacagcccaggcagtggaatgcttggccttagaaagccagggcaggttaggcctatctgatgggtatttgaattatgtaaatttgaaacagtgctgtatcagctaataaatctctctctagagaacccgtaatatcacagctagagggccagatccactgtgagctgagtttctgtgttgtctcccagtgctgtcacttcagctgataaacagaaacacccgctgttccttatcacgtgaaccttggattgtgttagttttgaaattacttgagatcttcaggagcataatgcaatcatcatctacttttctttttttctctttttttttgagacggagtcttgctctgtgcaacttccgcctcccaggttcaagcgattctcctgcctcagcctcccgagtaactgggattataggcacrtgccaccatgcccagctaatttttgtatttttaatggagatggagtttcaccatgttgttcaggctggtcttgaactcctgacyttgtgatccgcccgcctcggcctcccaaagtgctgggattacaggcgtgagccaccatctctctcttttttttttttttttttttttttgagacagggtctcgctttgtcacccagggtggaatgcagtggtgtggtcatagctcactgcagtctcaacctcctgggctcatgtgatcctcccacttcagcctcctgtgtagctgggaccacaggcacagccaccatgcccagctcctcatatcatttttttgggcacacgtgcatgtttggttgtctgccttgtttcctccaatccctttcattgttttccrcggttcaaaataaaatgaaatcttccactgtggtttcctgacttattttccccatgataggagaaagccaaagctgaaggactttggaaccttttcctacccttagaggctgatcccgagaaaaaatacggagcaggactgaccaatgtggaatatgcacatctgtgtgagctcatgggcacgtccctgtatgcccccgaggtaccttctttaaagttttcctcagtgtgtgggaacatcctgatcttcataagaactcaatcctaaacagataaaccagattcagaagcactggcatgaacttgaacttttttttttttttgagatggagtctcgctctgtcacccaggctggagtgtagtggcgaaatcttggcgcactgcaacccctgcctcctgggttcaagtggttctcctgcctcagcttcccaagtagctgggactacaggcatgtgccaccacacctggctaatttttgtatttttagtagatacagggttttaccatgttggccagactggtctcaaactcctgacctcaggtgatccacctaccctggccccacaaagtgctgggattacaggcgtgagccaccatgcccatccaatttgaagcttgaaatattaatgtgagaaggccaggcatggtggctcacacctgtaatcccggtacttttggaggccgaagtgtgggggatcacttgaggccaggagttcgacaccagcgtgtgcaacatagaactctgtatgtacaaaaaaataaaaaattaatcgggtgtgatggtgcatacctgtagtctcagctgcttgggaagctgaggcatgggaggatggcttgagctgaggaagtcgaggctgcagtgagccatgatcgtgccacgatactccagcctgggtgacagagcttgactctgttttttttagaagaggacatgacagtcatggtcacgctccttttccttctcaggtatgtaactgctctgcgcctgacacgggcaacatggagctgctggtgaggtatggcaccgaagcgcagaaggctcgctggctgattcctctgctggaggggaaagcccgctcctgttttgctatgaccgagccccaggtacgtcgcctgggctgccacccacttgcctggccctgttgttgtcggccccacagggaacacgggctgtctgctggcgtctctgactggaatatgctccccactcaggttgcctcttcagatgccaccaacattgaggcttccatcagagaggaggacagcttctatgtcataaacggtcacaaatggtggatcacaggtatttggcctaaaatgcactttccaaatgcacatcagggagtctgtgctgttaggcgcgtctctcaatgcctgggaggagcctctgctttttcaagttgacacaaaggagattctgtcacttagcgcccccagcagaggcagctgggagaataggagggtaatccgtggagcacactgttctcagaggtggcacttcacagggcagggacgtcccccggtgcccacacatggacggatgcctccctgcacatgtgaccccaggaatctctccacttcctgctgttcattctgctttgggcagctccccttccttggtggcttcctggctcctcgatcaggtgtgttacatcctaagggctaatgacaatcctgacttttagggattgtccagtgttacttttgcagggcccctacaagtagccgtggagcttacctcccggagcccatacctccctggacattaagaatgagcatccccattttgcaaaggaggaaaccgcactcagacttaggtcccttgcctggggtatgagcccccagccagcaagtagagaacccagagtcaaaggttcacctgattccaaggcccgggcccagagccgttatgtgtgcaccacctgtgggagccgagccagctggcagggatcaagtagcggttttcatcctcttgtctctaaattatattttctactctatgtgatgcttttaaaaacttgctcttatgatgttggattcattcctcactgggacaaaacccaatttgctcttatttctggtcagcagtctgcagatgctcatctgattacatggagccttaaagagctctgtctgcttccttactgtgcctttcktgggccaggaccacgtgtgtagagatttgatggccctggtgtcagatgatggggtctgtctctctcctttcctggcaggcatcctggatcctcgttgccaactctgtgtgtttatgggaaaaacagacccacatgcaccaagacaccggcagcagtctgtgctcttggttcccatggataccccagggataaaaatcatccggcctctgacggtgtatggactggaagatgyaccaggtgagacctccaggggcgggtcacccctgggtgtgggtctggtccccaggaaacaccactgaggggcccctgctcttgttcaggacttgccacatcccacgtctgagggtatgatgacatttggagtcacatgctcctgcatttcatttccatacatgaatatcaaccatgcaggcggatttcagacaggcatttatggatttttttccctcttctaaacttagaaagtaatcaggagtctgtgacacaggaagccatacagggcagacgcaggaagtggaccccaaacctactcttccaggccccagtgtgaacagctgacctctaggccacagccctggtttggtccgctcccagtttggttctctgctaatagtgttcacatttttactttcagtgttttcataggatcactacattgtcacaaaccactaggagcttcagcttaaggtggcattattatgtttttataaaaggaatcacagaatagtcatttgccattataaatcagtgattcattttctgtgtttaacaggctgtttcctgccgtccttttccctttaaccatgtcccagtaagaaggctaaataaagggcagggacattgccagcagataacccagactgaggtgaggaataaacacatccaaggaaaatgactatggctattgctcacagtgatcgtttgggtctttcaggtggccatggtgaagtccgatttgagcacgtgcgtgtgcccaaagagaacatggtcctgggccctggccgaggctttgagatcgcccagggcagactgggccccggcaggatccatcactgcatgaggctgatcgggttctcagagagggccctggcactcatgaaggcccgcgtgagtgctttcccccgcacccagcactgactcagaaccaccaccttctgctttgctgtcggacttcaattcctacctgttttctgagtgcagtcctagcaggtgaagcaaggtgatgtccttgccaagaagttgcattcctgtctgctttgcatctgctactttgctgcagtttggattcagagcagaatggaccccactctgtcgaggtgacctgaagggaaacgccaggctctgtagcagcagaggcaaggttccaaggtgtaaaggtcatgctgctagcacattattaaaaatcagtctgggtgcaatggctcacagctataatcccagtactttgggaggtctaggtaggagggttgcttgaagccaagcatttgagaccagcctaggcgaaaaagagagactcagtctctacaaaaaaaaaaaaaattttttttttttttttgagatggagtcttgctctgtcaccaggctggagttcagtggtgtgatctcggctcactgcaacctccacctcccgggttcaagcaattctcctgccttagcctcccaagtagttgggactacaggcacgtgccaccacgcccagctaatttttgtatttttagtagagacagggtttcaccatgttggccaggaaggtctcgatcccttgacctcgtgatctgcccgcctcgggctcccaaartgctgggattacaggtgtgagccaccgtgcccggcaaaaaaaagaaaaagttttttttgttttttttttttttgagacggaatctcactctgttgcctaggctggagtgcagtggcgcgatcttggctcactgcaacctctgcctactgggttcacaccattctcttgcctcagcctcccgagtagctgggactacaggcacccgccaccatgcctggctaattttttgtatttttagtagagatggggtttcaccatgttagccaggatggtttcgatctcaccgtgttagccaggatggtctcgatctcctgacctcatgatccgcccacctcagcctcccaatgtgctgggattaccggcgtgagccaccgtgcctggccaaaaagaaaaagttttaagtgccaggcatggtagcatgtgtctctagtcccagctactcaggaggctgaggcagaaggatcgcttgagcccaggagtttagggctgcagtgagcagtgatcacaccactgcactccagcctgggtgacagagtgagaccctgtctctttaaaaataaataaataaataaaaatcagacaccagggagatcccatgttgcttgtttttgtccctaggcttccatcatctggcctgtaccaccctcctccacagcacatccagaaaactttattcggccataatcctaccacccccaaagtttggaaacctaggttaaaagacagctgcttccaggacaggaattcaaattggtgattatcaatttcagaaaggtgacgcaaaccctgagaccaaaaccagtgtctcacaagaactgctattgaaagaacagaggcagtctgaattttttattaccgagcaaacctgtgatttacacccttttgagttaagactgaccagttattttttctttctaagtaaaacgctcctgtctatggactcaggtatggtgcttcagccccacatggaattaaattcagccttctggcagaataattggactgaatgagtcagacagaagtctccagaaagtgcatagcatgaacatggcacctccactgaagacttggttggagtaattaggaatctacaaaagatttgctacaaggaggttcaccacagtgcttattgaaatagcaaaattctgaacaacctataaggctaacaatgactgttggccaaataaaacacaagatggcatacagtgagactttaaatgatgctgtggaaatctattccttaacatggagaaattgctcactatatacacttaaatttaaaaaaaaagactgtggccaggtgtggtgacactcccagcactctgagaggccgaggcaggcagattgcttgagcccaggaatttgaaactagcctgggcaatacggcaaaacctcatctctataaaaaataaggctgggcgcggtggctaacgcctgtaatctcagcactttgggaggctgaggtgggcggatcacttcaggttaggagtttaagaccagcctcgccaacatggtgataccccgtctctactaaaaatacagaagttagctgggcatggtggcacatgcctgtaatcccagctacttgggaggctgaggcaggaggatcacttgaatccaggaggcggaggttgcactgagctgagattgcaccactgcactctagccggagtgacaaagcaagactccatctcaaaaaaaaaaattaaaattaaaaaattaaaaatagtagccaggtggggctgggtgtggtggctcatacctgtaattccagcactttgggaggccgaggtgggcagatcacctgaggtcgggagttcgagtccagcctgaccaacatagagaaaccctgtctctactaaaaatataaaattagttggacgtggtggcgcatgcctgtaatcccagctacttgggaggctgaggcaggagaatcgcctgaacccgggaggtggaggttgcggtgagccgagatcgcaccattgcactccagcctgggcaacaagagcgatactctgtctcaaaaaaaaaaaaaaaaagtagccaggtgtggtggcacacatttatagtcctagctactcaggaggctgaggtgggaggatctcctgagcctgggaggtcgaggctgcagcgacctgtgagtgtgccattgcactgcagcctgggtaacagagcaacaccctgtctgggaaaaaaaaaaacaaacaaaaacaggctgttagctttgatgcaaaataatgttttgttgttgttgttgttgttgttgttattgttttaagcaggctggccgggtgctgtggttcatgcctgtaatcccagcactttgagaggccaaggcaggcagatcacctgaggtcaggagttcaagaccagtcaggccaaaattatgaaacaccccatctctattaaaaaaatacaaaaattagccaggtgtggtggcaggcacctgtaatctcagctacttgggaggctgaagcaggagaatcacttgaaccccgggaggcagaggttgcagtgagccgagatcgcgccactgcactccagcctgggcaacaaaagcgaaactctgtctcaaacaaacaaaaaggctacaaaacmatatatagagtgtggctcccgtttttggaaaaaataagtatatataaaaaaactatagaaggatagaggagaatatccaccaaatattaactagtggtgactagatggtgggattctaggtgctcttactgtcttctctttttttgttctgaaaacaggtagtttttctgccatgagataaattatttgtgtagattgtttttagtgaaaaaaaaaaaaaaaaactaggctgggtgtggtggttcatgcctgtaatcccaacacttggggagaccaaggcaggaggattgcctgagtctaagagtttgagaccagtctgggcaatgtagtgagaccctgtctctacaaaaaattggaaagttagctagatgtggtggttcttgcctgtggtcccagctactcaggtggctgaggtaggaagattgcttgagcccgggaggcggaggttgcagtgagccaagatcacgccactgcactccagcctgcgcaacaaagtgagaccccgtctccaaaaaaataataaaaaaaagaaggaaaaagaataaataaaacaagaaaaaaaaaggaatacttagaaccttttctgatgccttgtgactttcagaatttaaaatcccccttgcagataaggccacccacggcggaaggccgggagcgagacggggctgaggggaccttgctcccattggagctgcagggcaggaaggggtgctgcggtcagcagagggcacccttcgcctgcgccgtgtgcagtgcctgcagtcactccctcattcccaggagtagccttgggtcagatgctggctcagatctataactgctcctgtctggtagccaggcctgcccagatgtgcaatggctggaataaagggttcttggaagcaatttgttacaggcaccctgtgggctgtggctggctgtggcacacgtgaaggttgtgtgtcagacctactccctggacatggcgcatggctgcacacaggcaccttggctgagaagatgcacagtcctggtttcactctcctcccctgccctgtcctgtctgcttccacccagctctgcaggccaccagcccccgcctctcgtggccacccccagcccagcatgtcctcagccgcacatctcctgtgtcgacaggtgaagtcccgcttggcttttgggaagcccctggtggagcagggcacagtgctggcggacatcgcrcagtcgcgcgtggagattgagcaggcacggctgctggtgctgagagctgcccacctcatggacctggcaggaaacaaggtaggggcaggggcacgagggggcctcccagaggcagagattcttcctcctcactcagcaaagcatgagagcctggcttcttgacattagaaactttatttcacctctacttggagctgtttgggcagtttttcaaaaattggaaaggcacaagaagagaggactggcctttgtgttttactgacctggtgagctgcttagtccaaggcagtgggtctgatggggccacagggcccctgggtggccctggactcccagggccattggtggaggtgttgggcaacctaagagtaaggcagggaaaagggaccctctgctggccttcatctgaatattgaattaacaaaaatagaagcttattttcaagtgtgacattagtcattcactaaggctctttttaaccttttatttatttattttttgagacagggccttgctctgtagccaggctagaatgcagtggtacatcatggctcactgaagcctcagcctcccaagtagctgggactccaggcgcaaacctccatgcccagctaattctttattttttgtagagaccggctctcaccatgttgcccaggctaactaaggctctttctaagtgcctgtgatgaccaagcacaatgccatgttgaccttgctttgtccagctttctgtggggcagcctccaaccccacccaagaccctcaaccatcagggaccaacccatgctcatgctcacagttcctggttctttgacgctggcgtgctagatatggtggaggctgctgggtgtctcccttgaacaccctgccccagggcagatcactgtagctcggtttcccagagccctgagtggccttggtccactgctgcttggaggcagagctggccgtgaccctgagcaaagcacaggaccctccccttatcccttcagtgtgtgctggctgtgttccccgtcatctgggaagacagccacattctgccagcacttgcttcgcatcttgtgacataagataatagttgccaacatggcgcccttcatccctgggtgctgtcaagccgtacaccaggcaggggcagcctcacccagctcacatcagcgagaccttggggcctctgttttggacggtggtgtttgacttcttgctgggaatctgatcattcttccaggctttctgccttcgggtcttttttgtggtttagtttttcgttttgtttttgagagacagagtctcactcggtggcccaggctggagtagagtggcacartcttggctcactgcaacctccgcctcccgggttcaagcagctctcttgcctcagtttcccaagtagctgggactacaggtgtgcaccatcacgcccagctaatttttgtattttttagtagagactgggtttcactatatgttggccaggttggtctcaaactcctgacctcaggtgatctgcccgcctcggcctcccaaagtgctggaatcacaggcctgaaccaccgcgcctggcctgttgtttgtttttgagagggggtctcactctgttgtccaggcttgagtgcagtgttgcaatctcagcttaccacagcccccaacttcccagactcaaacaatcctctcacctcagcctcctgagtagctgggactacaagcacatgctaccacaccctgctagtttttgtatttttagtagagatgggggacgggggggcctcactctgccacccaggctgccctcgggtcttttatgatcgcatctcctcctccttacaggctgcagccttggatatagccatgattaaaatggtcgccccgtccatggcctcccgagtgattgatcgtgcgattcaggtgagcacagaccagacagttggcttatttgaaccatcaatactagatgccaaactctcctatcttcagccgcccagcctcccatagaccctggcagatgccctgtgtcacccactcaccatgcatgcaactttccttttcctcttcagaatgacccagcaaggtgggaggtgccatcgtacccccattttgaatgtgaggaaacaggcacagaaaagtgaagtgacttgtccaggtcactgagcttgcaagtagctgacctcaaattcacatgaacttgggttttcataagcccagagcccaggctctttcccatgcaggggggccgcctccttagatcctaacccccggccccagcacagggcagaaggcacctgcagagtgggcctggggagtctggaggccgtgggatggcaggtgtggccccatggaagccctctggaatattagtgattgtatcacataggtgccacagggaagtccgggaagatggttgttatgggccatcaagagcaggctatcattcctggggctctcggagacaagggctgacccagggccgcctccctccactctgtgtctgccaggcctttggagcagcaggcctgagcagcgactacccactggctcagttcttcacctgggcccgagccctgcgctttgccgacggccctgacgaggtgcaccgggccacggtggccaagctagagctgaagcaccgcatttagagccttggggctgcagtggctcaatgtcctggctggtccagctgtgcccagatctgtcactgatgtgcctcgaaagatccggtgtttgtggctcctgcaccctgctcagcagctctgtcccgggacagtcagggtggactcaakctttctggttctccacagaagacgtctctgcaagaagcctggagtctgtttcaggccaggaggaggggatttgctgagggccaagggggttctgggacagagtctggaaagctggtcttcaggctcycagtcccaggctgggcaggcacggtcacttcacttcagcctttcagtccctctctctctgcctgtgggaatctggacacattttgggaggcctcccaaggctgtgggacgtgcttgctctggcagctgcagggttcctgtctggcctccctggtgagcagaggggcggccacggcgggyggtggcctaragacccaggacctgggcgcctgggaaaatggaatgcaacccacattgtaaagccactggcatctgattatctccatttgaacacacagcacagaacaatcatttaaatgttattttggaaaggggttttggggacacagaagaataagtaaacacatctcggaggctttgtggactttctgtgtcatacaaagagaatcgagtggagaggttcccttcagcgccttcatgcctcctccygcctgtgtttcctcgaggtccaggccatcatctcagccccatacatgctgggagcacagaggccacgggtccgataagtcccgagttggctgccttccctcactatgtagcccggggctctgtgctcatacatactttacccaggagctggcatgtgaggcccctgcagcctccacctgctccatagtcagaatatctgggcgaaggggaggtggtggcccattcgccattacactttggagcacaatctctcttctctgaggagagtggaaatgcttactcacttgcagtctgagctccttgagaaacccagcgacatgcagaggtgagccaggggcagtgaggccccagcctgctcgtctcataactcgtggtggggtagccaaaactcgtctcaggttagaccagacgggcaggaaccatcccccccggctgccaccttgcagaggtgaccctgtgggaactgccttccctgagaatggccagccaggatcagcaccatgaggggcccgtgaatgggctcctcagacccacatgcccaggggtctggggaggcaggtcccccttcaccacacttgagaaactgcttgttgctcaaggaagttaaaccccaaacaaatgcctgtcacaatgacagccacactggccaggagcccactgctaagctggcaggagcgcagcagctgagtgctccctcaggctccgggaggagaggttttcttcaaaaaaaaggaagtggtcgtggcctggcctgtctcatgggcctaagaatgtctttcgtggcctctgaggttaaccttgcctgttcagtaacgcagctgctgagaggaaaatgggagtcaggctgtgggtacccccatatctccctcagatcctctgccttgagggctagagaccccgggggccccaggaatgctgcctgcagacaggcaggtcccccccaggccctccacctctgctagatcattctgcccaccactgtcgagggagcctcagctctgggcccagcaggagtccaggccttggggaatgtgcaagtaaacaaaacaggacaactgctggcctttgggggtttgcatctcaagtaggggatggcggttagtgccccagaggcctgggcgtgtgatggggcaagcactgctggggctggaggctgaggggaggactctttccagaagaggtgtctcagccaaacctgcctgacaagaagaaagggcaggctgggcgccgcgggtcacacacataatgccagcacttcgggaggccagatggtgtctggatgccaagacctgtgctcgccaaggcctgatttcagataccgtcagatcattccacaacaatcctacagaggctgcaaagagacacttccaggcaacttgtctgggcagggccccttcaagacggcagctgggagtgacaccgaaagaacaggctccagtgatctctgctgcttgtacccattgtcagtcccccagggttgtcggtcaccacccagggcttcagagttccccagggatgcctcgggcgtgccaaggctgtcactcagagacccctcttgttggtatttctgctgccctccctgctgcgacataggtacagatttctccccttcgtccattttaccaaaatggatgcgcgttgggacaggtgagtcccggactccagcggcctggggcccacacctgcaagtaacctgggacagggtttcttttaatcaagttgactgagtggagaaatggcccaggggattttctgtcctatcagtgttagacggatgacacagtggtgaagagctgtcagaggtaaaggcggacactaaagtggtagggacaggttttatttatttttctgagacagagtctcactctgttgcccaggctggagtgcattggtgccatcttggctcactgcaacctccacctcctgggtttaagcagttctcctacctcagccttccgagtagctgggattacaagcatgcaccaccatgcctggctaatttttgtatttttagtagagacagggttttgccatgttgaccaggctggtcttgaactcccgatttcaagtgatctgcctgcttcaacctcccaaagtgctgggattataggcgtgagccaccgtgcccagcagggacaggttttaatcagtcataagccattgctttagagagcagggcccagcgggaactgagctccacttggatttgtgcggaggtgatgggaggggtggtggttgggaggggggctcaagagtcaggaaggggaaccagagagagcaggaaggagtgtggttggcgtgacacctgtctgggtttgctaactggcgcttagggttaggctcctgccctcccttggaggctgggggacagggtccatcttctagtgttgctggaacaaacagtaatttctttcagcagctttgggctttctcaggcaggtacgggcatcccacagatgtggtcttgagatgttggacaccatgtaacttaagtcttttcatgggagtatgggggtgtggacttaagcatttgtgctgaaagtctgcagttttaatatgccaagtttgaggtctagtggagatgggagttcagaggaaggctggcgagagcgtgctcaaggagagaatttttgtcaggactgtggctctagattcaaatggcccaaattcaaatgggtttaaatcctgactctgtgacagagtagctgggcaacctttggaaatgttccttcatcttagagacttagatctctcgttttatttatttatttatttaaattttttttaagagacagaggtctcaccatgttggccaggctggtctcaaactcctgagctcaagcaatcctcctacctcagcatcccaaagtgctgggattataagcatgcgccaccacacccggccagatttctcatttgaaaaatgagtagaccagtccttgcttcccagaatcacctgaggattaaatgggatgatgtgtggcttaccataagccacagcacacaccagctgttcgtgtgtggctggagtcaggagcgggacccgctaaagaggaggcggctgtgctcacattggagtgcaagaatgtggggcctcatctgggctgaggactagcctggaccacataagatgccatgcttctcacactcaactagcaaaggaatgcccctgcgatcaggttaaaatgcagagcgtggtgcggtgggcctgccttcctaacacacttgcaggtcatgctccttgttttgggacccactttgagaagcgagggtgagaagggcttgacttccctaacctgatccccaggggaggcagaatgagcagacaccgcctggctagaatcataagagctactgggtatttagtacataccaggtgccaagaactatctgtatattattattattattgttttttgagacagagtctcactctgttgtgcaggctggagtgcagtggtacgatctcagctcactgcagcctctgcctcccgggttcaagtgattttccagtctcagcttcctgagtagctgggactacaggcacgcaccaccacacctggctaatttttgtaattttagtagagacggtttcaccatgttggccaggcttgtcttgaactcctgacaggtgattgacccacctcagcctcctaaagtgctgggattacaggcatggccactgcgcctggccagttattttgaaccctataacaattggcagatccttttattctgcccctgctagagatgaggagacagaggttcaaaggaattgtgcaacttgcttaagatcacacagcttgtcagtgaattcaaacctaaattcagaagatcccagagctctttctactccatggcatggatcgttaagatcacctctgtgaggtactggcctcctcacctaggaaaggaggaagatgatgaggctcatgtcaccaaggagagcgtgctgtgccctcaagaagtgcatgagcttctgatgcttccagaataatctccgggatgcccccccgactgcctcttagggggtcaggctccatgatgggggtgtctgccctgtggccctggctgcctgtggagtgtcaagccagctgtgtgtccgagagagagagagattgtgtgtgtgtgtgtgtgtgtgtgtgtgtatgtgtgtgtgtgtacatatgcaaacaaggagggcagagctggggctcagggctgaccatatttttcctcctacctgtgagggcagatgtcttactgtgttttgttttgttttgcttttgagacggagttttgctcttgttgcccaggctggagtgcaatggcattatctcagctcaccgcaacctccgcctctcgggttaaagcgattctccttcctcagcctcccaagtagctgagattacaggcatgcaccactacacctggctaattttgtatttttagtagagatggggtttctccatgttggtcaggctggtctagaactcccaacttcagatgatccgcccgcctcggcctcaaagtgttggattataggctgagccactgcccccagccagatgtcttcctgttaaaatggggctttaaattcctcacctaacatcattgtttgcaacaacagcaacaaagagcttccatagacagagtcagtgtcccagaacggggactaaacaaccaaacatctagaatctcaccagtcagtgaccctgaaggagacctcagtcacaacctttgttggagagcaagtggaactagggttttttaaagcctgaaagcacatcagttgtgccctaacaatgaaaggtttcagagtagttgaaagctaggaatttgaatatcttagaggaagttaagtggcttgaggtgcttccaccgaaggtctcagcaccatgagaatgcctgtgcttctgccggccccattcctgccagtgagcccacagacaaggggcgatgaagaaccaggaaacagatggaaagaaacgtggaagagaggaaagcctcagactgtcagggtgaaatctaggttgagagttaagttttagttcattctttggagagactgagccacaaggagccataattacaatagcgtttcagcacatccaggtgatcttggtctgcagtatttggttgaggactgtgtgaaagcagctgaggccaaatgtggtggctcacacctgtaatcccagcattttgggaggctgacttgggtggatcacttgaggccaggagtttgagaccagcctggctaatatggtgaaaccctgtctccactaaaaatacaaacattaaccaggcatggtagtgcatgcctgtaatcccagctacttgggaagcttgaggcaggagaatcgcttgaacccaggaggcagaggttgcagtgaactgagatggtaccactgcactgcagcttgggcaacagagagagactccgtctcaaaaaaaaaaaaaaaaaaaaaaaaagcagctaaggaaggctactatggtcacaaaagacttcccagaagatgggacttgggctggatcttgatagggaagatttccataaggagagagggcaggacatgggtggaacaggtgcaccaacagtagggcaccagggatgagagagctgctggttaggattatggtgagcaccacagaccacagacaaaccagaataaacgaacctgtggaccagcgtgtcctgcactgagacacacaccacgcacaccaacagggacgaagcacgttgcccacattgtatcgatgtatgcgaatgtggataagtcagctcattttctccttcccctccccacaaccaagtttactgctgctcctggctcccccatcctggggaatagcacatggtaagaacctcagcacccactccactcctctcgccctcatctccacacagctacctgtcaattccaccttcacactctttctgccaactgagcc

SEQ ID NO: 94643 - DNA, 51898 bp, Homo sapiens
  misc_feature (1)...(51898): n = A,T,C or G
atacagattatttcatcactcaggtattaagcctagtacccaacagttatcttctctgcctgttcctctccctcttcccccccaccctcctgcccgcctccaccctccccctccagtaaaccccagtgtctgttgtttccttctttgtggtcatcggttctcatcatctagctcccacttataagtgagaacgtgtggtatttcgttttctgttcttgcgttagtttgctgaggatgatggcctccaactccatccgtgttcccccaacagacatattttttaactcaatgggggatcgtcataaatatattttataacctgcttttataaattaacgtcatacttgaagcattttaccctgccagtaaacattctttgataaaatgactttgagcggccactgtttgttcattgccttattttcagtcatcggggttgtatagcagctgtgaaagtgtgcccctcagatttcccactctgggaagtataattgacccagggcccccagctgctgtgcccggaaatccatcacccagcacatggagaccccgcttcccgcaggcttctcccatctagagacagcrtggcagggatgctgaggctggctcgttcctgggagacccaggcttctcttaggattttcccacattcgtgctgaagtctcccaggatggcaccgtaggctgagacgctgcccccaacctcctttccttccttcatcctgtcctccagcaagagtcagacctgcctgtggtgggacagctccctgaatcccctgctccctcctcttttccctcccaggcctggctctgatgaatctctttatttatttagtattttttcaagacagagtctcactctgtcacccaggctggagtgcagtggcgccatctctgctcactgcaacctctgcctcccaggttcaagcgattctcctgcctcagcctcccgagtagctgggattacaggtgcccgccaccacgcccggctaatttttatatttttagtagagacggggtttcaccatgttggccagcctggtgttgaactcctgacctcaggtgattctcccacttccacctcccaaagtgttgggattacaggcataagccaccacgcctggccttgatgaatgtcttgcatggcaaagaatcccatcttggtccctgcttctagaggacctggactgacacaggtcatctccacttcggtttgcttgtttggttttggtgttaccctcaatgctattatgagcatgtaagtgtgcatatcccatccaaatctaggattattgccttaggaaattatgtgaggcaggaattccaggagagggttactgggtggagaccgaatccctgtgtaaggctctgatgcgtgtttcagaagtggctgagtgggcctttctcaccctcaggctttctcacttgtaaagctctgctgatgtgaaggcataagaaacctcctgtttatttgcctttcttggttacttgtgaggttgagcagtttcacatttactgcctatttaatttctggctttatatgtaagcatttcttttttgttgttgttttttgtttgtttgtttgttttgttttgttttgagatggagtcttgctctgtcgtccaggctggagtgcagtggcgtgatctcagcacactgcaacctccacctcccaggttcaaatgattctcatgcctcagcctcccgagcagctgggattacaggcgtgcaccaccactcccgcccaagcttttcttttgtttttctctcccttctcctccttcttttctcatttgtctctctttatctgatcacctcttctatttgctttgtctcttttttttttttttttttttttttttttgagacagagtctcactctgtcacccaggctggagtgcaatggtgtgatctcggctcactgcagcctccactacctgggttcaagtgattcgtttgcctcagcctcccaagtagctgggattacaggtacccgctgccatgcccagctaatttttgtatttttagtagagacggggtttcaccatgttggccaggatggtcttgatctcctgacctcgtgatccacccgcctcggcctcccaaagtgctgggattacaggcatgagccactgcgctcggcctttttttaatttttgtttttttgagacagagtcctgctcagtcacccaggctggagtgtagtggcacgatctctcctgactgcaacctccgcytcccgggctcaagccattctcctgcttcagcctcccaagtagctgggattacaggtgcctgccaccatgcccggctaatttttgtatttttattagagacggagtttcaccatgttggccaggttggtcttgaacccctgaccttgtgatccgccgcctcggcctcctaaagtgctaggatattacaggagtgagtcaccatgcctgacgtttttttttttttttgagtcgggttttgctcagtcgcccaggctggagtgcaatggcacgatctcggctcacgcaacctccacctcctggattcaagtgattctcctgcctcagcctcctgagtagctggggttacaggtacataccatcaagcctggctaatttttgtatttttagtagagacagggtttcaccatgttgaccaggctggtcttggactcctgaccttgtgatctgcccgcctcggcctcccaaagtgctgggatattacaggagtgagccaccgtgcctgacgttttgtttttttgtgtttttttgagaccggttttgctcagtcgcccaggctagagtgcagtggcatgatctcggctcactgcaacctccacctcccggattcaaacgattctcccgcctcagcctcctgagtagctgggattacaagcamccgccatcaagactggctaatttttgtatttttagtagagacagggtttcaccatgttggccaggctggtcttgaactcctgacagcaagtgatccaaccgcgttggccttccaaagtgctgggattacaggcgtgaaccactgtgcccagtcctttttgcctctttctaggttttggcggattatcatcaacataaattctagtgacttgagagtttgtgctagttgcgttccaggtaacttaggagttatcacactcacccctgcggtgggttctgtcccatgctgcgtctttcgggaaaggcaaatatgagttagattttttcctcttgcatatgttgtgggaggtgatcttgatttacatacaaatgtctgcccctaatctccttccctatctccctttgacatttttcttgtttctgagaatctgtggggaaaacaggcatcaaggcaaacatttccatacgggtagaccccctgcatcaggcctcagggtcttgtgccaaaaacagcgagcaccatgaatgggagcgctgccacaggctgcagcccaggtgaaccttcaagacaccatgctacgagaaagaaacagccacaaaagaccacatgttgtctgattccatgtatgtgaaatggccagacaggcaaacccatggagacggggagtggcttagtggttaccagggacggaggccagggaaggatgggaagcgtctgcccatgggcacgaggtttatttatttatttttgcagagatggggtcttgctgtgtttcccaggctggtctcgaattcctgggctcaagcgatcctcccacctcggactcccgaagtgctgggattacagatgagccaccattcccagcatagtacagagtttcttttggggatgataaaaatgtcctggaattagatagtggtgatgtggcacaactgcgaatatctttaaaaacatcaaattgtcgctgggtgtgctggctcttgcctataatcccagcacttcaggagagtgagctgagaggaaggcatgagcccaggagttcaagaccaacctgggcaacatagtgagacctcatctgtataaaaaaacaaaacaaacacaaaagacatccaattgtaaactgtatgtatgtatgtatgtatttatttattgagacagtctcgctctgttgcccaggctggagtacagtggcatgatctcagctcactgcaacctccatctcccaggttcaagcaattcacctgcctcaccctcctgagtagctgggattataggcacaggccaccacgcctggctaatttgtgcatttgtattagagatggggtttccccatgttggccaggctggtcatgaactcctgacctcaagtgatccgcctgcctcggcctcccaaagtgctaggattacagatgtgagccaccacacctggcccaattatacactttaaatgggctaactttacagtatataaattatatgtttaaaaatgtttaaaatactgattccaggctgggcgcggtggctcatgcctataatcccagccctttgggaggctgaggtgggtggatcacgtaaggtctggagtttgagaccagcctggccaacatggtgaaactccatctctactaaaaatagaaaaattagctggtcatggtgacacgcacctgtaattccagctactcaggaggctgagggaggtgaattgcttgaacctgggagccagaagctgcagtgagccgagactgcgccactgcattccagcctgggtgacagagcaagagtctgttaaaaaaaagaaaaaaaaaaaaaaaaacctgattccagggcccagccaaaactactaaatcagaacctctgggtgtaagcctaggaatctgcatttcacctccctctcagcagtaccggctgtgtactttgtttagaaatcactaagcatttcaagacagtgatgagaacagagggtgaaaacaagctcagggccctctgagctctgggccccatgactgagtaggtcacaggctcgtgaagctggccctgcagcccagaatgaagcctgcatgctctacccaaaggacgacggagcatttggttagcgggtttgcctcttcatccaaggacctggaaggagaggagaaattagcaactttaaaggtttcctctccctgtaagagcagtgcggtggttttagtgagaagagtgcagcggagtcccccggcccgtggctgagtcatctccagaactgtgggctttcagtgacagaaggagaaaggctgagcctgcgctagatctgcgggagctccttggtcaatccatcaatccaatagcattaaatgactcttctggcagattggatcagaatgggaattcattaaaggagaccaggtggttcgcagaatcgctgtgagcctgttgctcatgggaacccgtctggggtggggggcaccaggcggccactgagagctcagcccctgttcctccagagaggggatcttgttgcaattgccacctctccgtgcaacgaagcacctgccaccatctccgctgctttgtgtcaccagcgtctgatttgaagtctgattgcattgccgcggtctcaggcccacaacctagctaagagggaggctgggaagacaagtgttgcatttcagtttctgcagcagacagcaggtccctctgcccaccaaacaacccttacccagagtgggcacatgtcaagcttttattcaactcggtgttgagggaatcagcgtaacacagctgattcaaaggaggagatgagagactagtattggtttctcatctgtctgtctgtctgttgtcagtgaagataaagaatgccagaatcaaacagctctgttagatgcgaaagtggttcatgccctacagtaaatacaaccataacctttggagtcatcttctctactgggtagagatcatttgcatcttatctgttttctctaagttcaaagaccctggggcctaatgaataatatataatacgtcaaacaaagttccattctctgagaacaatgccaaagttccattctccgagaacaatgccatctaatagaacttcctgcggtaatggagatattctgtctgtgctatccaatgaggtcgccactagccactgcagctgtcgagcacgcaagatgtgagtgacactgagaaactgagtttttttaaaaagtttttttttttttttgaaatggagtctcactctgttgcccaggctggagtgcagtggtgcaatctccactcactgcaacctctgcctcccgggttcaagcaattctcctgcctcagcctccctagtagctgaaactacaggtgtgcaccaccacacctggctaatttttgtattttttagtagagatgaggttttaccnnnnnnnnnnnnnnnnnnnnnnnnnnnnnnnnnnnnnnnnnnnnnnnnnnnnnnnnnnnnnnnnnnnnnnnnnnnnnnnnnnnnnnnnnnnnnnnnnnnnnnnnnnnnnnnnnnnnnnnnnnnnttttaagtaattaaaaaaaaaatagaagtgggaaggccgggctgtggtggctcacgcctgtaatcccagcactttgggaggccaaggtgggcggatcactcaaggtcaggagtttgagaccagcctggccaacctggtgaaaccccatctctactaaaactataaaaattagctgggcgtggtggtgcatgcctgtaatcccagctacttgggaggctgaggcaggagaattgctagaacctgggacgtggagattgtaatgagccgagattgcatcattgcactctaacctgggcaacaaagrcaaaactctgtctcaaaaaaaaaaaaaaagaggtgggttctcaccatgttgggatctcgccatgttgcccaggctggtctcgagctgatcactcaagtgatccacccacctcagcctcctaaagggctgggattacaggggtgagccacagcacctgacctattttaagtaattttagatttatagaaaatttatagacagtacagagagttcctatatacccttcacccagcttcccctaagtgggaatttgttaagtaactgtgcacgtttataaaaactaagcgattaacactcatacaatattaatcactaaactaccaactgtctgaattttctccatttttttcactaatgtctgttttctggtccaagagtcagtccaagttcccacattgtgcttagtgcttgtatctccttagtcttcaatctgtgaccatttcttagcctttccttgtttttcatgaccctgacacttttgaagagtgccagtcaaggattttgtgaattgaccctaggttgggcttggcaggtgttttctcctgatgggactgggatggtggttttggaagatcacagagaagtgagggaggtaccttctcattgtgtcatgtgaggggtgcgtgatacccaagcgtgggctcactggccagaggtggtgtctgagatgcatctcccctgccaccttaccgtattccctcttgtgctctgttctttagaagggagtcaccaagtcccacccgccttcaagatgagggaagttaagccccacctcctggagggaggaatatcgaagatttgtggacatatgttaaagccaccaccatggtttgaagggagattctttgaggctatgcagatttcctgtttctccttaaagtttcacctgctaacttcagcattcttctgtggatcctgcctgaggcagttattactgtggtgttctaatgatgattttctatttccctcattccttctatatttatgatttattaattagaattctagttgggcgcagtggctcattcctgtaattccagcactttgggaggccgagacaggtggatcacgaggtcaggagatcgagaccatcctggctaacacggtgaaaccccgtctctactaaaaatacaaaaaaattagccgggcgtggtggcgggcgcctgtagtcccagctattctggaggctgaggcagtggaatggcgtgaacccgggaggcagaggttgcagtgagccgagatcgtgccactgcactccagcctgggcgacagagcgagactccgtctcaaaaaaaaaaaaaaaaaaaaaaaagaattctataaggaacatttgaaccttttccctaatttatttatcttgtcaaccatttattttgttgttgtttgttgttgttgttttgaaacaaggtctcactctgttgcccaggctggagtatagtgacgccatcttggctcactgcaacctccacctcctaggttcaagcaagtggtacctcagcctcccaagtagctgggattacaggcatgcaccactacacttggccagtttttgtattttttgtggagatgggatttcgccatgttgcccagcctggtctcgagctcctgacctcaagtgatgttcctgcctcagcctcccaaagtgctgggattacaggtgtgagacaccacggctggcccaactatttgtttatatcaaaatgaacttgtgggtatttactttattctttgaaaggacataggtcatctttttgccttatttcccagttttagataatttttctaatatgtgtaaaggtgttctgatgtaggacagtcaaaaagagagatagaagtccaccacactggatattttctggaaagatcaccaaaaccttgtcattggaaactaggatatctgggggcttaaatgcctgctacggggccgggcacggtggctcacacctgtaatcccagcactttgggaggccaaggcaggcggatcacaaggtcaggagatcgagcccatcctggctaacacggtgaaaccccgtctctactaaaaatacaaaaaattagccgggcgtggtggcgggcgcctgtagtcccagctacttgggaggctgaggcaggagaatcgcttgaacctgggaggcggagcttgcagtgagccgagattgcaccactgcactccagcctgggtgacagagtgagactctccgaaggaaaaaaaacaaaaaagcctgctaggggctgcagtagaaatacctgtgagaataaaaatgagaagtccaagactgaagtgcgtgtctcagagtcctaaccacatccctccttacatatggacttgtgcaaaccacacctcttcggtcctcagtttcccccgagataagatgaakatataggtgctggtagactcaagattagtggttctcaaacttgagggtgtattagaatcccctggagggccccataaagcccagatttctgtctccacccacagaccttccgattcagtaggtctggggtgagacccaatgattgacatttctaaaatgttgccacgggctgctgctgctgctgctgggccagggaccacgttttgagtccgggtgatctctaagaagccttaacagttgtggacttaacattgattcaaatgacaaaatctttggacctggctaggaagaagtcccctaggccctgaaaacccagtggggagttgtgcagaggacactgtaagattgctgcatgccgcgcctggcattgacagcctgtgaggcccaaccactgcccggggagggtcaaagcctgagtaaggcagagaagctcaggctggaaactgggctccaccccttaacagctgtgtggccttgagcaagtgactgactgacttcctgcctcagtttccctacctatgaaaagaggatggtgcttaacatgacctggcataaagaaaatgctcaatgagtgtttattgctgctgaggtcttgctttgtctctggagtgagtggtgctgtcctagctcactgcagcctcgaactcctgggctcaagcaatcctcccacctcagcctcccaagtagcacaccaccatgtctggctaatttttttgttttgttttgggttggtttttttagagatgggatcttgctatgttgcccaggctggtccgaaactctggccccaagcagtcctccagccttagcttcccaaagtgctgggatatctgatctgtgttacaaccctatgaggctgtggccatcaccatcgccatttccagacgaaactagccaccgtgtcccaccagggtcattatttcttttctctttcttttttttaaatagagatggggtctcactatgttgcccaggctggtctggaactcctgggctcaagtgatcctcctgcctttatctcccaaagtgctgggattgcaggtgtgagccacagtgcctggctcagggtcattattttttattgagcccgtccagtgggaagaaatgacagtggtagaagcgatacctctttctagagcatgtccatctgccctctgccacaactctacccagcttggagtcccatttgccaatgtcaagcccctcacaaaatgtgtcacagattatgagaaaaattcaatataatttattaaatagattccgagggctcccccagggagcattgacaactcttagtacaataaatatcaataaattaacatagctgccacctcccaccctcacgagggtataataagtaagacttaagcctgcagaagaaaagcattccataaataccaagactaataacaataacctaatgtttttcaaggtaattcacaaattcacatctcagccctcccgggactagcccatatgaggggtccctgagattattcattggaaaaatgtacttaaggaatcacggcagagttcccacacttagctgtcggtcatctttttaaggctccttaagttcctgccaatccgaaaggaagagatggccttaagtggtggcctgttgggctccagaggtcaatgattttagtgcgaggtccatgcactctgaaaactgttgagaaatagtcaggatgaagcgtttacattcatgggtgtctgttggcacagaaatgtttgtttctggtgcatcttgaaatatgagtttgtcgaggtgctctatgatctcatcaataacagatttgttgtctagctgtctgattgtcttgagatatgcccggatggctgggctgtggatgttgtttggcggctgggcgtcagggctgagmcacggcagcgtgtaattctgggacacgakcacscccttctcttcctccacctgtggaatgaggagaaatggtcagtgttgggtttgcaatgacagctgcaagtcttaacagtgaatgtttgcatgcttcctccgtaacccgcctcgttgatatatttatctgatcaatgtcacaaccctatgaggctgtgccatcaccaaccccatttccagatgaaactagagcttaggtggctgcagtcctgaagcctgtgctcagaaccactgatccatccagctgaggcctcccagccttccagaacccactctcacgtgctcagggtggtgggaattgcagcacatctggccttccatggcagctccccgccctttgggactctgtgttaaagccacgcacgctccacttataaaggagagtgttaggcttgtccggaaaggcctccgagatgcaggcgagagttttccccaacaaaccaaggagtccggaccactccctcccttcctctttctaagtactaactagagtcagaccaaattgccagcagcacctcatcaacctgaactgcccagtcatcttgggttggtaacaacctctgccttttataaaagccaaggctaaggtctaaataccaaggcagatgagaagagtaatgccaattttatgaattgtttccaagtttgggcatttgtttgtttgatcaaagctatcttggctgggcacagtggctcacgcctgtaatcccagcactttgggaggccaaggcaggcggatcacttgaggtcaggagttcaagaccagcctggccaacgtggagaaactctgtctctactaaaaatatgaaaattagctgggcgtggtggcgcatgcctgtagtcccagctactcgggaggctgaggcaggagaatcgcttgaacccaggaagcagaggttgcagtgagccaagattgcaccactgcactccagcctgggtgacagagtaagactctgtctcaaaaaaaaaaaaaaagccatctttgcctgtctagtttcccccatcccttcctggcatagctacagccctggtttcaggtccggagagaggagcctctttggagggcaatggaaggcatttttaagaaatcgtttagaaaagaaatctcyagggcactcacatctttcaaaagcatcttygagagggactgtaattcctcgactattttctgtacatcatcacttggtcgtagtaaacggacgggcaacgtgtgggaggccarccagcctcccaggcagcagaacagaaagagcacagacgtcgaggggcctggagagagaacgatgccgtgagcgcatacatcacacacccctgcccaccctggctccatccctgcagccctgctgagccaaccctgggggtagtgcttccagaatcttcctggtgagataagatgatgcccaagactccggaagcaccaggaccagtgatacctgagtgagaggccatggcgagagagagcaaggccagcttcagtgggggcttctggagccagatgtgttcgccatggctgcctggaggtatataaagggccagggtgaggagaaagagcagtcagcgtcccgcccatggcaaaaccatttactcagcttttctccagaaaacactcaaaagttctactggccacggctgagtgaaagggctgaatggaaatgctgaggttaccctccaggtgggcagatgcctgactcagacacacacatacttcacaagaaggcacatgaatgcatctttgccattcttcttggaaggagcctgttgatttgactagacaaaattttgaagcccagggttgacagacacgaccataccaccaaggagcgggtgacttccaggagttcaaggccagcggccacagggaatttctggggaggaaatgcgaagccggcatgagatgtgcagaatgcggtatctctggaaatttctgcagcatatgcccacgccggtgtgcagggacggccccataactgctgtgaatgtggcgggtcgaaggcttcatctcaactccatgtggccttggacatcactggactctccatcgtgcctctgcaatctcagggcccagaaccagagactgtgatccagagttattgcttgaaatccttgttcatatcttttttcttttttttttttttgagatggagtcttgctctgtcacccaggctggagtgcggtggcgtgatcactgcaacctctgtctcctgggctcaagcaattctcatgcctcagtctcagcctcccaagtagctgggactacaggcacgtgccaccatgcccagctaatttttgtatttttagtagaaatggggtttcgccatgttggtcaagctggtctctaactcctgacctcaggtgatctgcctgcctcggcttcccaaagtgctggaattacaggcatgagccactgcgccagcctagaaactttattgcttttctttctttctttctttctttctttttttttgagacagagtcttgctctgtcgcctgggctggagtgcagtagcgcaatctyggctcactgcaacctccacttcccaggttcaagcaattctcttgcctcagcctcctgagtggctgggattacaggcgcccaccaccacgcacagctaatttttgtatttttagtagagacggggttcactatgttggccaggctggtctcaaacgcctgaccttgtgatccacctgcctccgcctctcaaagtgctgggattacaggtgcgagccaccactctggccttagaaactatttctaagttcattagctttctttttctttctttttttttttttttgagacagggtctcattctgtcacccaggccagagtgcagtggcatcatcacaactcacggcagccccgatcccctgggctcaagtgatcctcccacctcagcctcccaaatagctgggaccacaggcacaaatcactatgctaatttttttttttcttttttgagacagagtttcgctcttgttgcccaggctggagtgcaatagcacgatctcggctcactgcaacctccgcctcctgggttcaagcgattctcctgccttagcctcccgagaagctgggattacaggcacccaccaccacgccgggctaatttttgtatttttagtagagacggggtttcaccatgttggccaggctggcctctatctcctgacctcaggtgatctgcccgcctcagattcccaaactgctgggattataggcatgagcgactgcacccggcctccttattcatattttagtgccagctttgatcaggccattttatagggtatcgggaatagcggtgaagaagttagagttcctgcccttgtgggcccgtcattgctgtgggctgcggacaatagcaacaacattcataaataagctagaaagcactgtgacggttggagagtgacgggcaggatactttaagtcaggtgatcagcaaaagtctctctgagaggtgacattgaagaagagactgaaagacaagaaggagccagtcgtgggaagacctgggagaagagtgttccaaggcaacgggacaggagtgcaaaatcctcaggtgaaaatgagctcgatgctgttcctagaacgggaagagggtcatggcagccacagtgacgcgagaggacaggagggtagtggggaggtgggcagcggctccatcacagaggcctgaggctgggacaaagagcctgggttttattccacatgtgacgaggcagtgctgggcggctttcagtagggaaacataagatcagatgcactttatttttttcttttcttaattgttttgtcttttgttttgtttttttttttggagagaagatctcaagcgatcctcccaccttggcttcccaaagttctgggattacaggcatgagtcaccatgcctagccctgatgaactttatttattagtagtagtagcatttttttttttcttaagacagagtctcactttgtcgcacaggcaggagtgaagtggcgcaatctcagctcactgcaacctccacctcccctgttcaagcaattctcgtgcctcagcctcctgagtagctgggatcacaggcatgtaccaccatgcctggctaattcttgtatttttagtagagatggagtttcaccatgttgggatgaggtcagtctgggcagcccacagaactcaaggtgcacagaggggacacagccaggaagccctcccacccatcatcccaagtccccctgccgccagccaccactgactttttctttacttcccaaactgccacaatatggctttcaccaccccactaatgtaatcaatatcctctagcagagtccatggtaggcatgaccttcatccacaggtgtttactgccataattatgttgcattgcatggcaaaaggggttttgtggatgtagtcatgattactattcagtttacctaaaatagagagattttcctgcattccctgggcctccccaatgcaatcccatgagcccataaagcagaagaggaagtcagagagattaygagcaagagaagggctcacctgctgttgctggcttgaagatggtggggggcagcgtggaaagcacgagaaggaaataatttggtcaataaccactgagcttggaagaggatgctgagacctagatgagaaccctagccagccagcacctttatttcagctcagtgagttcctgagcaaagaatctatccatggcatgctagactttgacctacaaactctatgagagagaaagtgtgtgtgtgtgtgtgtgtgtgtgtgtgtgtttaatagaaaggatcttgctctctcacccaggctggagtgaagtggtgtgatcacggctcactgcagccttgacctcccagactcaagcagccctcttaccccagcctcccaagtagttgggactgtaggcctgcaccaccatgcctggctaatttttctattttttgtagcgatgggatctcaccatgttgcccaggttggtgttgaactcctgggctcaagcagtcctgcctcaccttcccaaagtgctgggatcacaggcgtgagccactgcgcctggccacnnnnnnnnnnnnnnnnnnnnnnnnnnnnnnnnnnnnnnnnnnnnnnnnnnnnnnnnnnnnnnnnnnnnnnnnnnnnnnnnnnnnnnnnnnnnnnnnnnnnnnnnnnnnnnnnnnnnnnnnnnnnnnnnnnnnnnnnnnnnnnnnnnnnnnnnnnnnnnnnnnnnnnnnnnnnnnnnnnnnnnnnnnnnnnnnnnnnnnnnnnnnnnnnnnnnnnnnnnnnnnnnnnnnnnnnnnnnnnnnnnnnnnnnnnnnnnnnnnnnnnnnnnnnnnnnnnnnnnnnnnnnnnnnnnnnnnnnnnnnnnnnnnnnnnnnnnnnnnnnnnnnnnnnnnnnnnnnnnnnnnnnnnnnnnnnnnnnnnnnnnnnnnnnnnnnnnnnnnnnnnnnnnnnnnnnnnnnnnnnnnnnnnnnnnnnnnnnnnnnnnnnnnnnnnnnnnnnnnnnnnnnnnnnnnnnnnnnnnnnnnnnnnnnnnnnnnnnnnnnnnnnnnnnnnnnnnnnnnnnnnnnnnnnnnnnnnnnnnnnnnnnnnnnnnnnnnnnnnnnnnnnnnnnnnnnnnnnnnnnnnnnnnnnnnnnnnnnnnnnnnnnnnnnnnnnnnnnnnnnnnnnnnnnnnnnnnnnnnnnnnnnnnnnnnnnnnnnnnnnnnnnnnnnnnnnnnnnnnnnnnnnnnnnnnnnnnnnnnnnnnnnnnnnnnnnnnnnnnnnnnnnnnnnnnnnnnnnnnnnnnnnnnnnnnnnnnnnnnnnnnnnnnnnnnnnnnnnnnnnnnnnnnnnnnnnnnnnnnnnnnnnnnnnnnnnnnnnnnnnnnnnnnnnnnnnnnnnnnnnnnnnnnnnnnnnnnnnnnnnnnnnnnnnnnnnnnnnnnnnnnnnnnnnnnnnnnnnnnnnnnnnnnnnnnnnnnnnnnnnnnnnnnnnnnnnnnnnnnnnnnnnnnnnnnnnnnnnnnnnnnnnnnnnnnnnnnnnnnnnnnnnnnnnnnnnnnnnnnnnnnnnnnnnnnnnnnnnnnnnnnnnnnnnnnnnnnnnnnnnnnnnnnnnnnnnnnnnnnnnnnnnnnnnnnnnnnnnnnnnnnnnnnnnnnnnnnnnnnnnnnnnnnnnnnnnnnnnnnnnnnnnnnnnnnnnnnnnnnnnnnnnnnnnnnnnnnnnnnnnnnnnnnnnnnnnnnnnnnnnnnnnnnnnnnnnnnnnnnnnnnnnnnnnnnnnnnnnnnnnnnnnnnnnnnnnnnnnnnnnnnnnnnnnnnnnnnnnnnnnnnnnnnnnnnnnnnnnnnnnnnnnnnnnnnnnnnnnnnnnnnnnnnnnnnnnnnnnnnnnnnnnnnnnnnnnnnnnnnnnnnnnnnnnnnnnnnnnnnnnnnnnnnnnnnnnnnnnnnnnnnnnnnnnnnnnnnnnnnnnnnnnnnnnnnnnnnnnnnnnnnnnnnnnnnnnnnnnnnnnnnnnnnnnnnnnnnnnnnnnnnnnnnnnnnnnnnnnnnnnnnnnnnnnnnnnnnnnnnnnnnnnnnnnnnnnnnnnnnnnnnnnnnnnnnnnnnnnnnnnnnnnnnnnnnnnnnnnnnnnnnnnnnnnnnnnnnnnnnnnnnnnnnnnnnnnnnnnnnnnnnnnnnnnnnnnnnnnnnnnnnnnnnnnnnnnnnnnnnnnnnnnnnnnnnnnnnnnnnnnnnnnnnnnnnnnnnnnnnnnnnnnnnnnnnnnnnnnnnnnnnnnnnnnnnnnnnnnnnnnnnnnnnnnnnnnnnnnnnnnnnnnnnnnnnnnnnnnnnnnnnnnnnnnnnnnnnnnnnnnnnnnnnnnnnnnnnnnnnnnnnnnnnnnnnnnnnnnnnnnnnnnnnnnnnnnnnnnnnnnnnnnnnnnnnnnnnnnnnnnnnnnnnnnnnnnnnnnnnnnnnnnnnnnnnnnnnnnnnnnnnnnnnnnnnnnnnnnnnnnnnnnnnnnnnnnnnnnnnnnnnnnnnnnnnnnnnnnnnnnnnnnnnnnnnnnnnnnnnnnnnnnnnnnnnnnnnnnnnnnnnnnnnnnnnnnnnnnnnnnnnnnnnnnnnnnnnnnnnnnnnnnnnnnnnnnnnnnnnnnnnnnnnnnnnnnnnnnnnnnnnnnnnnnnnnnnnnnnnnnnnnnnnnnnnnnnnnnnnnnnnnnnnnnnnnnnnnnnnnnnnnnnnnnnnnnnnnnnnnnnnnnnnnnnnnnnnnnnnnnnnnnnnnnnnnnnnnnnnnnnnnnnnnnnnnnnnnnnnnnnnnnnnnnnnnnnnnnnnnnnnnnnnnnnnnnnnnnnnnnnnnnnnnnnnnnnnnnnnnnnnnnnnnnnnnnnnnnnnnnnnnnnnnnnnnnnnnnnnnnnnnnnnnnnnnnnnnnnnnnnnnnnnnnnnnnnnnnnnnnnnnnnnnnnnnnnnnnnnnnnnnnnnnnnnnnnnnnnnnnnnnnnnnnnnnnnnnnnnnnnnnnnnnnnnnnnnnnnnnnnnnnnnnnnnnnnnnnnnnnnnnnnnnnnnnnnnnnnnnnnnnnnnnnnnnnnnnnnnnnnnnnnnnnnnnnnnnnnnnnnnnnnnnnnnnnnnnnnnnnnnnnnnnnnnnnnnnnnnnnnnnnnnnnnnnnnnnnnnnnnnnnnnnnnnnnnnnnnnnnnnnnnnnnnnnnnnnnnnnnnnnnnnnnnnnnnnnnnnnnnnnnnnnnnnnnnnnnnnnnnnnnnnnnnnnnnnnnnnnnnnnnnnnnnnnnnnnnnnnnnnnnnnnnnnnnnnnnnnnnnnnnnnnnnnnnnnnnnnnnnnnnnnnnnnnnnnnnnnnnnnnnnnnnnnnnnnnnnnnnnnnnnnnnnnnnnnnnnnnnnnnnnnnnnnnnnnnnnnnnnnnnnnnnnnnnnnnnnnnnnnnnnnnnnnnnnnnnnnnnnnnnnnnnnnnnnnnnnnnnnnnnnnnnnnnnnnnnnnnnnnnnnnnnnnnnnnnnnnnnnnnnnnnnnnnnnnnnnnnnnnnnnnnnnnnnnnnnnnnnnnnnnnnnnnnnnnnnnnnnnnnnnnnnnnnnnnnnnnnnnnnnnnnnnnnnnnnnnnnnnnnnnnnnnnnnnnnnnnnnnnnnnnnnnnnnnnnnnnnnnnnnnnnnnnnnnnnnnnnnnnnnnnnnnnnnnnnnnnnnnnnnnnnnnnnnnnnnnnnnnnnnnnnnnnnnnnnnnnnnnnnnnnnnnnnnnnnnnnnnnnnnnnnnnnnnnnnnnnnnnnnnnnnnnnnnnnnnnnnnnnnnnnnnnnnnnnnnnnnnnnnnnnnnnnnnnnnnnnnnnnnnnnnnnnnnnnnnnnnnnnnnnnnnnnnnnnnnnnnnnnnnnnnnnnnnnnnnnnnnnnnnnnnnnnnnnnnnnnnnnnnnnnnnnnnnnnnnnnnnnnnnnnnnnnnnnnnnnnnnnnnnnnnnnnnnnnnnnnnnnnnnnnnnnnnnnnnnnnnnnnnnnnnnnnnnnnnnnnnnnnnnnnnnnnnnnnnnnnnnnnnnnnnnnnnnnnnnnnnnnnnnnnnnnnnnnnnnnnnnnnnnnnnnnnnnnnnnnnnnnnnnnnnnnnnnnnnnnnnnnnnnnnnnnnnnnnnnnnnnnnnnnnnnnnnnnnnnnnnnnnnnnnnnnnnnnnnnnnnnnnnnnnnnnnnnnnnnnnnnnnnnnnnnnnnnnnnnnnnnnnnnnnnnnnnnnnnnnnnnnnnnnnnnnnnnnnnnnnnnnnnnnnnnnnnnnnnnnnnnnnnnnnnnnnnnnnnnnnnnnnnnnnnnnnnnnnnnnnnnnnnnnnnnnnnnnnnnnnnnnnnnnnnnnnnnnnnnnnnnnnnnnnnnnnnnnnnnnnnnnnnnnnnnnnnnnnnnnnnnnnnnnnnnnnnnnnnnnnnnnnnnnnnnnnnnnnnnnnnnnnnnnnnnnnnnnnnnnnnnnnnnnnnnnnnnnnnnnnnnnnnnnnnnnnnnnnnnnnnnnnnnnnnnnnnnnnnnnnnnnnnnnnnnnnnnnnnnnnnnnnnnnnnnnnnnnnnnnnnnnnnnnnnnnnnnnnnnnnnnnnnnnnnnnnnnnnnnnnnnnnnnnnnnnnnnnnnnnnnnnnnnnnnnnnnnnnnnnnnnnnnnnnnnnnnnnnnnnnnnnnnnnnnnnnnnnnnnnnnnnnnnnnnnnnnnnnnnnnnnnnnnnnnnnnnnnnnnnnnnnnnnnnnnnnnnnnnnnnnnnnnnnnnnnnnnnnnnnnnnnnnncagcctcccaaagtgctgggtttacaggggtgagccatcgcgcccagcctaatttttctaataacagtaaagttgtcccgatatcgtatagtcaaaaagaatgagagatgttaatgtgttcctccaaaattcatttgtcagaacctgatgcccagtgtgatagtattaaaacgtggggccctttgggaagtgattaagtttgggggctcctcaggaatgggatcaatgtccttataaaagaagcttcatggctgggcgtggtggctcacgcctgtaatcccaacactttgggaggctgaggccagtggattgcctgagcccaggagtttgagaccaacctgggcaacatggtgaaactccatctctactaaaatacaaaaaattaggctgggtgcggtggctcacgtatgtaatcccagcacttggggagaccgaggtgggtggatcacctgaggtcaggagttcgagaccagcctggccaacatggtgaaaccccgtctctactaaaaatacacattagcggggcgttgtggcaggcggttgtaatcccagctactcgggaggctgaggcaggagaatcggttgaatctgggaggcggaggttgcagtgagccgagatcgcgccattgcactccagcctggacaacaagagtgaaactcggtctcaaaaaaaaaaaaaaaaaaaaaaaaagccggaagtggtcatgcgcgcctgtaatcccagctactcgggaggctgaggcaggagaatcgcttgaacccgggacacggagattgcggtgagctgagatctcgccactggactccagcctgggcgacagagcgagactctgtctcaataaaataaaataaataaaaaatttaaaaaatgaggtctgggtgattaaacagttatacaggtggacagtgataaaatccctgactccagggttagagagaccaccctggaacccactggctggttggagtcgagatgtttgaccttgggccctcttctcctttctccatctgtcagatgggtataggatgactttccgtggggagtgcttgacaggagctaagaaacaggtcagctatggcgcttactgcctgcgggagctgccgcacttagaaccaccagctgttatcccatttttatagatgagggcagaagagaaaacgcaggtggttggggccaggctgtctgatccggatgggggacttttccctcggggcaggtgagagcgcckggagaggcccctgcccccgcgcacgcgtcctagcggttgccgggcaacgcggcccgggccatggaggcgtcgtacgagtccgagtccgagtccgagtctgaggccgggcctgggactcagcggcccgggaccgggaccgtgagcgcggccgtgcgcgagcacttgcggaagctgtgtctgcgcgagttcccgtgcggtgccggcagctgggtgcgggcgccggggccggaactctgggggcctggaccggctgcggggaggcacgggcccgggcgagcggagcgggctggtccctggggcctgggatctgcgcattctgggggccgccgacatgggggcgggtggggcttgagggtgacggtggggcccgagtcgcgggcactgcgcggggaggagagcggggcccgtcctgagcacatcagctgacctgggctggggcctctccctgacttgaagacgycaacaccccagatttctagtgggcaggctccttttggggtgaaaagcttttgttttgggcaaagagttccacaacttttcccagcctccgagcatttaataagagcctgaggcagtgtgagaggtggctcagcctgaagcctgcgaccttgagtccaggagaaggggttaccccccatcctgcctccctgtctccagagtcctagacccttccctcccgtggcttcaaccacgaggggcgcccaggtgtggcccaggaaggcttactgcccaggctggagcatagtgacgcgatgtcgacttactgcaacctccgcctcccaagtagcagggattacaggcacctgccaccatgcccggctaattattgtatttttagtagagacaggatttcaccatgttgcccaggctggtctcaaactcctgacctcaagtgatccacctgcctttttaaaaggaatggcaccttttaattattttgtatctcacctcatctgtagttatatccatggctaataatccatcaaaattattgattattcactgtctagattttttttttttttttgagacggagtctcgctctgtcacccagcctggagtgcagtggcgtgatctcggctcactgcaacctccgcctcccgggttcaaacgattctcctgccttagcctcccgagtagctgagactacagttgcgtgccaccacgcccggctaattttttgtatttttagtcgagacggggtttcaccgtgttagccaggatggcctcgatctcttgacctcatgatccgcctgcctcagcctcccaaagtgctgggattacaggcatgagccaccgcacctggcctactctctagatttctaaactctacccctaatcgtccagttttatgatctgttctgttttgagagtttggtgtccttaagggggctgtgtcacacctacagaaaatccctcctctgccactgcagaataagtcgcgctttcttcctcaaacttggcgaacttggagggagcttgtccccagagaggaggatgtggtgagccccggagaggagacggtggaggccctgctgggcctggtcygcagccgccactccccctgggctctgctgaacaactcgaatgcagaagacagtttcctgagagaattggccatccggaacccgctgacgatcacagacaccttcttctactcctacttccggtccctgcgggtaatagacaagaaggtcagtgctgggcacgtggtaggtgatgttagggtggccgctcccctaagggaggttgtggggagggcacccttccccacagcgcrtcagggatcctgctttcagggctgaaacgaaggccagcctgccctccatctgcttcatctccctggcttgtgtgccaggcagggccggctactcggtcagccttgcgtttcttcttcctttacccctggaagccatcatggcacagcttccacccctgagttctgcagtggaccctcctgggtcctagtaaaggttttttgaagggtctgtgttagttttacttcgtttaaaccgtgggggtcagggtaggggaaggttggtgtagttctattttaatttgttaccaaaaagcattctttgtttacatcagtagcagagcccagtctcggcatggtggctctctggtgcttgtaatctcagcactttgggaggctgaggcaggaggatcgtgtgagtctaggtgttagaggcccagcctgggcaacatagtgggatcccacctctgtaacatctttaaatttagccaggtatggtggtgcacgcctgtagccccagctactcagaggcttaggcaggagaatcacttgaggtggggaggtagaggctgcagtgatcatgatcgcaccgctgcactccagcctgggtgacagaatgagaccctgtctcaatcaattaagcaagcaagcaaacaagagtgagactctgtctcaataaataaataaagccagcaagccagcccaaaaattgcctggaaacttggtctcagccttcccaacccttggctttctttttccagagccactgggaagtgacacggcactaggggacaaatagggtgactgactggtagcagtttgccagggactttcagtttcagtgcagaaggtttcgtgtcctgggcagactggcacagttggtggccctggagaagcgaggccccgctgggaagggccctgatgtctttgaggtcacaggaactgaggagtcacggatgggtcactgcagcttctggtcggaccctgctctgggtgattcctggacaccttgactgacttcagtgcccagagttcactgtggctctggggtagacagaaaggagagaggttcctgccctcgcaggtggcttatggtccaacaaaggacacaggtcattggcctagaaatcatgcaccacctatggtcagaggaaggatggaggttgggagaggctcttggatcctggcagagcgatgcagtgcaggaacggcttccggggagcagggggtgggaagggaggggaagtaactctgatggaggagccgctgtcttcctaatgtggacatgggttctgtgcccgtgctccctctcctgctayagccctcagcttcctctcccctcttccaggtcaccctggtggataaagacctcctgaaatttctaaagctggaggagttggtactgagcgccaatcgaatcaaggaggtggatgccaccaatctgccccccacactcaaggtgaaggagccccggtctgtgttgagtatttgggcctccgctgcccagaggccttgccttaccctgccccacatagtgtggccagcatgggtggagggtaaggcccagctccaggcttttaaaatgtaggtcactttcctagaaaagttcaacatagaataaccatatgacccagtgcttccattcctaggtgtatccatgaaggaactgaagacagggatttagccagattcttgtactccagagttcagagctgcgttactcacaatagcagaagggtggacacaactcaagggtctataaacagatgaatggataaacaaaaaaatgtggacaggccaggcgcggtggctcacacctgtaatcccagcactttgggaggccgaggcaggtggatcacctgaggtcaggagtttgagaccagcctggccaacatggcgaaaccccatctctactaaaaatacaaaaattagccgggtgtggtggcatgcgcctgtagtcccagctacttgggaggctgagacaggagaattgcttgaacccaggaggcaagggttgcagtgagccgagactgtgccactgcactccagtctgggcgacagagtgactccatctcaaagtggtctatccattcaatagaatgctattcactcatagaaaggaatgaagtaggcctgaatcccagcactctgggaggctgaggtgggcagattgcctgttctcaggaattcaaaaccagcctgggcaacataggaatatcccctctacaaaaatacaaaaattagccaggcgtcgtggctggtgcctgtaatagcagctactcaggaggctgaggcaggagaatcgcttgaacccaggaggcggaggttgcagtgagccaagattgtgccactgcactccagcctgggcaacagagcgagactccacctcaaaataataataaataaacaataaataaataaaaattaaaaaaacccaaaccaacaagcaaacaacaacaaaaaaaggtgggtgaggccgtggataagaactacaagcaaggaaggttagctttggatttattccttatccatctaggagcccttttggcctcccagagacgcattcctatgggttgagaaggtgccagatgttatgcagctcccccactgccaatccagcatcaccccccattccagatgttgaagtgtctttcacaaaaggaaaagaaacttcccaagacctgctgcaggaatcttttcttcctgggtttttaaaagggagtcggggtggtgccagggaggccaggtgtgagtagtttgtgattcctctactaagttttgcgggacagaggggaggggcctgatcctcagcgctgacttggggccccatcgtcccgggccttccgtgtggtctcccaggtgctggagctctayggcaatgagatcagcagcatggagtgtctgtgtgcccacccacccgccggcctgcagcacttggggttaggccacaacaaacttctaggccccttggaaagtctctacgtcaccgctaatcactggtaactygggagcccagatggaaagtgagagggagggattaagtatcaggttggggcgattctaccccagtggcttgagaactcagctttggtcttttttgtaactcccagttggctgctaaatccagacttatggtttatttctctgaatcccccttcagtgggattttgtaaacaaaaagcccggggaaggagaacaagaggtagtaggtgtgagtcagagcctttgctttggtgccgtattttaattttttaatttttttatcttatttttttatttttttgagacagcatctcgctttgtcgcccaggctggagcgcattggcgccatctctgctcattgcaagctccgcctcccgggttcacgccattctcctgcctcagcctcccgagtagctgggactacaggcacccgccaccatgcccggctaattattttgtatttttagtagagacggggtttcactgtgttagccaggatggtctccatctcctgacctcgtgatccgcccgtctcggcctcccaaagtgctgggattacaggcgtgagccactgtgcccggcctaatttttttattttaatttttttattttaattttttattttaatttttttttgagatggagtttcactctgttgcccaggctagagtgctgtgtgtgatctcggctcactgcaacctccacctcccagggtcaagcaattctcctgcctcagcctcccaagtagcgggtattacaggcacccaccaccacacctggctaatttttgtatttttagtagagacggggtttcaccatgttggccaggatggtctcgaactcctgacctcaagtgatccacttactttggcctcccaaagtgctgggattacaggcgtgagccaccgcacttggcctggtgccgtattttagaggagggttgctcaccttgggctcgttggcatcggaaccccatcaccctttgatgtggggctgtcctgggcatggtgggatattgagcagcatacctggcctgcacccgcagatgccaggagcacttccccattagttgtgacaaacaaaaatgtctccagacagtttttgtctgagcctgatgtcccctgagcagcaaaatccccccaagctgagaaccaccaccctggaaccaagccctagcgccagccgctccatcgctattgaaggttcaggctcattaggagcctgcagatggttcagctcccagttgatattcaacttgatctcctcagtgggtgagcggtagaaaacttaacatcctggacctgaggggtaggaggggatcagagaccacccagaaaaagccatcaaaggaagctgggagaggaaggctttgcaaaacatgctgtgagaagtcccaggacttcagcagcccagcaaggatggaaggggtagaaccacctcccctctctccttcccccgaggaacctggagggcatgcccttggggggtccaaccctctacatgcctggagcgggcggacgcagcagggaagggaagccccctctctgaccctggtttcctcttcctccccttctcttctgctcttaggggaagagtgaggctgggattgggagatgctgtgctgacagcggccgcttgtgtttttcttctgttctcagagctgagatcaatttgctttctagtttgtggcagcaggaaagtcaccctgcccctgccctgtgtcttggtctggccacaggccttggcccgtgctctttgcaggcccctcccaggcccctttcctcctggggtcccgccccagtctggctttgagaagccatctcctgcttctagaccgcccagccctccagcctctggctccctcctcccactccccagcatcaaccccactcctgccctgtccactcctgccctgtccacaactcccccacggtggctgtcccctgctgtgccgtccagtctgcctgtactatttgtgcagagcctcctagacgcacgcagtgcgcgaggctctgtggaagctactgagaggtttggccaagaagagaggagccccgtgaagggaggtcggtgggggcgtctctgtgactccaactgtgagggtggcagtgctacggagagtggagatgaagagccaggcactcgttcccgacccggggttaacttgggtcaagggtaggacaggggtgcaggccgtggatgggcagaatccttagccccaggctccccgtccgttttggccacaggctgcttgccccctgctcacctggcttcttgacccccagacggtcctgctcaccttccaggcccaacctcgtctccctggacctgggcttcaacgacctgacagacctgcagagcatggtcaccagcctgaggaccctccgrcacctgcgactcytggtgctgmagggaaacccactggccttggtgcccyactaccgcggcctcaccatcgacagcctggcccagctctgcgtgctggacgacatcaccgtgtctcccaatgagaagcatctcttccgggggctcagcctcaatggcggtgagggtactggcatgcagggagggggtggcatgtgacaccccagcctgcgcctggctgtgccccgccctcctgggtccgtgtacccgtctgtcctgcaactccccatttgacccagaccctattcaggtatagcctctcttctgggtcagagctttccaccagrctttgattcctgtgattgggatttggagacagaagtgatagggggaggccgggcgcggtggctaacgcctgtaatcccagcattttgggaggctgaagcagacagatcgcttgaagtcaggagtttgagaccagcctggccaacatggtgaaacctcgtctgtactaaaaatacaaaaattagccaggcatggtggcaagtgcctgtaatcccagctactcaggaggctgaggcacgagaatcttttgaacccgggaggtggaggctgcagtgagccgagatgacaccagtgtactctagcctaggtgacagagcaagacaaaaaaaaaaaaaggtggtgtgggaggatcacttgagcccaggaggtggaggctgcagtgagctatcatctcaccactgcactctagcctggcgacagagcgagaccccgtctctaaaaaaaataaaaagtcaaaacaacctgtggggacttgggacagttatttcaatcagctttttcacctccctggtggcttgagatcacccccttgtggttcatgccgcaaggtgcaccggaggcttctccaggtcactgtgacgtgctagataatgctaaggtgacctgcagagtagcccttatcactcccatatacagatcaggaaaacaaggctgaagaggggtataatgacacctggatcactccaggccagcttgccagagctgtgacatgaacctgaccgccccaccaaggctcagccctgagtgctggagagaatctagggacccgtgccttcccagccctcttgctttctatctgccaacttccattccatgggcccccctgtcctgcccattcctccctgcagatctcttggcacaggaggcgcagtttgtggtgaccatcggaaacatcagaggagtcctggacacctctgtcttagacccggaacccaggcccgaaggccctttcatcacttacaactattacgtgacctatgattttgtgaaagatgaagaaggcgaaatgaatgagtccgcgggcgtcctggccgaggtgtgccctggtctgtccctaggagtatggggggctcttgtgaaggctgaactgctttgtgggccccaggaaaatccttttaattaattaattaatttatttattgaggaggagtctcgctctgtcacccaggctggagtgcgatggcgtaatctcagctcactgtaacctctgcctcctgggttcaagcaattctcctgcctcagatccccagtagctggaattacaggtccccaccactaggcccagctaatttttgtatttttagtagagatgagatttcaccttgttgaccaggctggtctggaactcctgagctcaagtgatcctcggcctcccaaagtgctgggattacaggtgtgagccaccgcgctggccaagaaagattcttaatgtggaatctggtgattcatgcaaggacctggcttcagctcagcctctttcttgcagctagagcaattttcaaccatgcacactccccttgcccccttaaaatctgagcctaacaagagagccacccggcatttcataagtcagccccttgttcccagccccattctgcaatttatttcttttttgtgtgtgtgtgtgatggagtctcgctctgtcgctcaggctggagtgcagtggcgcaatctcggctgactgcaacctctgcctctgggttcaagtgattctcctgcctcagcctcctgagtagctgggattacaggctcgcgccaccatacctggctcattttttgtatttttagtagagatggggtttcaccatgttagccaggatggcctggatctcctgacctcgtgatccgcctgcctcggcctcccaaagtactgggattacaggcgtgagccaccgcgcctagccccattctgcaatttctacaactcctcccatctccctccacatcagaagaaaacccaaggataccatccaaccaggagaaacctgtctcctcctcccacatagaagtggttcttgcttttactcttaatgtaggtctttcagaaaagacaaaagtgggtttctaagcgccttcctgcctcctagcgtggtgtgtctgctcatgcgtgaacctcatccagatgtcgggagctgtgttacagacacccccggcatcagctgagcacatcctgaagacggcagccttggacgagtttctgtctcttcctgcagatcgtcaagccctctcccagcttagaattattagttgaggaatctcctgaagaggtcgtggaagacgtcatcgaagacattgttgaagaggttactgaagaggtcgaagggtctctggagtctgaggtggaggagtcaggagagtcggagctgtctgtcatctcggggccttcgaccatcttgcagatgccgagggcctctgcagaagagctggccaagttgaggctgcgtatagatccccggctctgcccgtccccagggtaaggatggaaatctgaaccagggcaagtggtcagagcagtagggtcacgagcctagaccacactgcgaccttccattaaaagtcctgaggctggcggggcgcggtggctcacgtctgtaatcccggcactttgggaggcagaggcgggcggatcacgaggtcaggagatcaagaccatcctggctaacatggtgaaaccccgtctctactaaaaatacgaaaaaattagccaggcgtggtggcaggcgcctgtagtcccagctactcgggaggctgaggcaggagaatgtcgtgaacccaggaggcggggcttgcagtgagccgagatcgtgccactgcgctccagcccggcgacagagcgagactccgtctcataaaaaaaaaaaaaaaaaaaaaaaaaaaaggcccactagactgttagctgtgctggcggcatttagatttcgtgttcagccctcttctctggagggttcaacttagctaaatccttctactctaaccatctactcaaagtacaactgagtcccacttccctgaccagccaagattttcggaatgattgaatttcttttttggcggggacagtctcactctgtcacccaggctggagtgcagtggtgcgatctcagcttactgcatcctccatctcccggattcaagcaattcttgtgcctcagcctacagttgggactacaggcatgtgctaccatgcccagctaatttttatagttttagtaaagatggggtttcaccatgttgaccaggctggtcttgagctcctggtctcaagtgatctgcccgcctcagcctcccaaagtgctgggattacaggcgtcagccatcgcgcccagcctgaatttcttgagtcgatcgagacatgataaattaatagcccttttcatttcagcccttgggtgtgaaaaccttttttggtttaacattttaatccatctaagatgtattctcacacataaagtgctgtaaggatcttccatcctgtataccatgttctttcttgccagtctagctccattccttctctcttttttgtgccacttttgttatgaagattgtagagtaattgttataaatattaattttattataaacataaatatgttacagacccaacaatacattgttataattactgctttatataatccatgtcttgcagagaagaaaggagagcacaaatataaagttgtttttttttttaagcttgttaaccttcttagttaccatttctggggaaccatgaattcatgtcttcctttagaattgatttactgttgtggctcatgcctgtaatcccagcactttgggaggctgaggtggacagatcacctcaggaggtcgagacccgcctgaccaacatggtgaaacaccatctctactaaatacaaaaaattagccaggagtggtgactaatcccagctgtaatcccagctacttaggctggggcaggagaattgcttgaacccaggaggcagaggttgcggtgagccaggattgcaccattccactccaccctgggcaataagaaagaagctccgtctcaaaaaaaaaaaaaagaaaagaaaagaaaaaaggatttactttctggtttcattccctccctccctctttcttcctttctctcttttttgtggtggggtctctcgatgttgaccaggttggtcttgaactcctgatctcaagcaatcctactgcctcagcctcccaaagtgctgcaattacagatgtggggcactatgcctgggcttggtgtcattttcttgctccagtatgcttcattctcacccccatttccttcatgttgttatggtcaaatatattacatttctacatgttatagcccaaactacaattttatagatgttgtcttatgctattgcattttattctaattagaaccaaggacaagaaatatatgactatactgtcttttgtatttgcctacatgattacctttattggtgatctttgttttttatgtgaatttgaattaccctctggtgttacttcctttcagcctgaagaacttccttcaggaagttaatgtattcatgtattcaacttcttttcatgtttcgtgtaaggcaaatctactggcaacaaagtcagttttttctttctcttcatatgtctttatttcacctgcaattttcaaagatagttttgctgggtctagaattgttggttgacagttttggtgtttttcttttcccctgctaccccagaacatttttttttttttgagagggagtctcgccctgttgcccagggtggagtgccgtggctggatcttggctcactgcaacctttgcttcctgggttcaagcaattctcctgcctcagcctcccaagtagctgggattacaggcacctactaccatgcccagctgatttttagttgaggcggggtttcacagtgttggccaggctggtcttgaactcctgagctcaagtggtccatccgcctcagcctcccaaaatgctgagattacaggtgtgagccaccatgcctggcctaccctagaactttgaatatgtcgccagcctgcctactggcctccattgtttctgatgaaaactcagctgttcatcttattgggattcctttgtctgtcatgagtcatttttctcttcctgctttcaggattttcactttgtctttcagcatttttactatgatgtctctgggtatggatgtgtttgcatttatcctgcctggagtttgccaagcttcttcaatatatagatgaacgttttaaatcaaattttggaagttttcagccgttatccttcaagtatttttctctgttcctttttctatctcctctccttctagcacttctattatgtgttcttctagtagctcttcagaaaacccaagggaaacctggagtgtttaccaggggcccacctccttggagggctttgaacacaaatttttgttcccctagcgcccatgaggttgcctaaagttctctttagcttctcagccaccacttttggatttggctcttgagcattaatgtggcactaagctcattctctttgactgttcccctttgccctgatgttggccctgaaaattctcagtgacttggctcttcagcaccttcaacagataatgttaatattgtgtcgagctgatatgactgttctcagcaggaaggtttgtccagtatagtctagtctaccacgtcctaaaacagaatttccacattgattttctaaacatacattttatttttgcagtctaatagatttattttaaattgtcttaagttatattccttagtttacttgtaagcctttatattttccatacaattatttgccatatgtaatttcccaagttcaacaattagcaaacgccagtcatccacataccatttccaggtgcaggtgtgatgccaggtatcgggattacaaacaacaaatcagatggaaaatggtctgttctagagggctgggcacagtggctcatgcctgtaatcccagcagtttgggaggccgaggcaggcagatcacttgaggtcaggagtttgagatcagtctggccaacatggtgaaaccctgtatctgctaaaaatataaaaaattatctgggcatggtggcacatgcctgtaatcccagctactcaggaggccgaggcagaagaatcactggaacccggaaggtggaggtggcagtgagccgagattgcaccactgcactccagcctgggaagactctgtctcaaaaaaaaaaaaaaatctgttctatttgggcacttaccttttcatgagggaaatgaacaaacagtaattacatatgttaatgtcacaagtggtacgtcagaggaagtacaggacaaatctctgcccctaggatgggcacatagacttagaaagtgtgggaaacacattcacccatccaaacccaaagaacagactcagagacacgaagaacagcggaaatgagacttttcatggcagttttggaagatcaggtgtctggtaggcaggaacactggggcagtcacgacaggtcatttatctcctagtgggcaagtccctcccccagttcctcattggtcaagtactatggggttacaatcttcctgggtgtcgcccaagtatcattatcccctaataaggtcataccccgtctccttccccacttaagttttgctcttgtcgcccaggctagagtacagtggtgtgatcttggctcactgcaacctctggctcctgggttcaagcaattctcctgccttagcctctgaagtagctgggattacagatgcatgtcaccacccctggccaatttttttttgtatttttagtagagacagagtttcactacgttggccaggctggtctcaaacttctgacctcaggtgatccacccaccttagcctcccaagtgctgggattacaggtgtgagccaccgcgcctggccccctttcatgggctgacccctcctctacatcctgttcgctaagtgtgactttctaggtgcctgagtcgtgaggttcgtcacgtccgcaaggttggctgccagtactcagattttttatgccttgaaaatggaccatttaaactgtttctcacaggaggcatggtagaaagaaggttaactatggaggaaggcagggattggcaagagatagggctgcagagagacagagaaaaagaccctttctcccaaggggaaactagtaagaagttttcaagcagaggagtaatgagatcaggtttccatttgaggaagatgactgcagtggagaagatgacagtgtgcagacagactttcaactcttctactcacttctccggtagattgttgagtgctaacctttatatatttgtatcattcatgtacatatgttatcactggtttggggtttttttttcatgccattttttattcaggagggtctaacatttctttaacctgagaagtacaatttttctttttcttttttcttttttgagatggagtttcactcttgttgcccaggctggagtgcagtggtgtgctctcggctcaccacaacctccgcctcccgggttcaagcgattctcctgcctcagccacttgagtagctggaattacaggtgcccaccaccatgcccggctaatttttgtatttttagtagagacagggtttcaccgtgttggccaggagagttcgagaccagaactcctgaccttaagtgattcatctgcctcagcctcccagaatgctgggatgacaggcatgagccactgcgcccggccgagatatagttaatatatcataacgttcatgttaaagcgtatgagtcggtggtttttagtgtattcacagagttgcgcaaccattaccacagtctaattccagaacgtttccatcaccccagaaaggtacccattaggcgtcaccttcgattccccatccctctagtccaaggcaaccattaaagtactttctgtctctgtggatttgcctgttctggatatttcatatggatggaatcacaaaatacatagccttttgtgtctggcttctttcactgagcatcatgttttcaaggctcatctgtggtcggtgtaataagtatcagtgcttcattcctttttttttttttttttttttttgagatggggtttcattcttgtcacccaggctggagggcagtggtgcgatctcggctcactgcaacctccacctcccaggttcaagtgattctcctgcctcagcttcccaagtagctgggcttacaggctcccgccagcacacccggctaatttttctgtattttttagtagagatggggtttcactatgttgcccaggctggttttgaactcctggcctcaagtgatccgcccacctcggcctcccaaagtgctgggattacaggcatgagccactgagcccggcccatatcactatgtttcaaaccagttattattgtcatatgtactttcacgattttttttttttttttgagacagagttgctctgtcagcaggctggagtgcagtggcgcgatctcggctcactgcaacctccacctcccaggttcaacgttcaacttggacatactttaaatttgttggagtatattattaattctccttcatgctgtgatccaattggtagaacaatttatgttaaatcacttcctgagtgggatgctgcttcagggttgccatggtgttctgagacttaggaaactccagtcgcctctgtgttctagcctggggctaggctagaattgtttcagcttttttttttttttttttttttgagacggagtcttgctctgtcacccaggctggagtgtactgtcgcgatctcagctcactgcaacctccacctcccaggttcaagcgattctcctccctcagcctcctgagtagctgggaccacgggcacatgccaccacgcctggctaattttttgtatttttagtagagacggggtttcactgtgttagccagcatggtctcgatctcctgacctcgtgatctgcctgcctctgcctcccaaagtgctgggattacaggcgtgagtcaccctgcccggcctctgcttttttttttctcctgcaggagggtctcactttgtcgcccgggatcgagtacagtggcatgaacatggctcactgcagccttgacttcctgggctcaagcaatcctcctacctcagcccccaaagtagctgggactgcagccatgtgccaccacgcccagctaatgtttgtattttttgtagaaacggggtctcgatatgttgcccaagctgctctcgaactccttggttcaggcgatcctcctgtctcggcttcccaaagtgctgggattagaagccagagccaccacgctcagccctttgctgaacttttaacaaacaactcttgctgcctttcggttggtttctttcagttgctcagggtggtcctgcctctgaaggagggctccacttgcctttcttttgctgtctcctctgtatccacacctttctggccttctggtccccttgccctgcctggtggcagccggacctcacgtctcatgctgtttgtgggcttcgatgctcgtggtctcctcggatgtcccctcacagtcctgtcccgggtccctggccacagcccctgggtgacggcacccccgtcttcatccctccctcccsaaggactgtcctcttcagcactgcccacaagccctgggctgaggtcatcccctgcagttacgagatgcagcactctctcagggacctggtcccactgaaggccttcctgctggcggggaccaccgtraccatcgtggaggagaaggtgggcaggcggaggcagtgcccggccatccacaggctgcacttctgtccttgttcctgttcccatcgggctgtcccccatgggagccscactccctggttagatgagttctcagcgccattccagaaagggtgagggagaggtgaccccaggcagcccgcctgggcctctgctcactcgaggattctctcctgcccctagattctctcctggcctgtggtgctacctgctgttgacagtccyctgtctgccaagaaaggaaagggggagaaagacaagaaagggaaggagaaagacaggacggggaaaggagagaaagagccggccaaggtaccgggccttggtgctggggagggcagcctggccacacccttgcttcaacttgtcccaccctcctgtcctcccgtcgtcgcaggagtggaaggtgctgaagaagaagaaagagccgcccaaggagctccggcaggacccccccatcctccaggtgctgggccggggcctggtgatcctggagcccctgctcgccggggagcccctggtgtccaccgtgtgcaacttcggcgtggtccgcacattgacatctgacaggctgacgttggccagggtacagccgggccctagccacatcctccacctctgccttcgccctccccatgggaaccccgcgggcaagcaagggctgkgggcccaggtcacgggatggggaggaggtggtggggagggcctttccctggggcatgcagctgggctgctggtgctgccgcctgcacagagggcgcctccgtggactttggcccagtcagcagccttccctttggggatgggctggggcagccaccctcaccaggagacccccgccttcctggacctgtcagagccttggaggaggtggggccccagagacaccccttctctagtmcctcccctctccagtaagcatctcgttttgtggttctttctctcaggattcaaagaagattaagaargttgccaaaaaaggtgagtgccgatggtggtgaccaaaggcagggattgtcaggaggacctgctgagggccagccctgggggaggccaaaggaaccaaagggtggggaatggtagcttctggcctggggagaggccacatccccscttagatccagtgttattatttcttctctgcagccctcagaccacagggcctgtgtgggtggtgaccagggtggggaaggcacctgtggtagagccayagsggggcaagagcttggagctggggctgcctggggctcatctggttccgaggtgtctgcctccagcttcaggccatcggcccttatttgctgtaagaggggcctgggcttgtcctgtggggagctggagaagcatctgaaatgggtgcgtctcaggtttgaggttcagaaagaacaaccaactgggagggagagaaaggagacagggagtgccgtgggaggtggctgcaaaaagcatgaggcccgatcatagcagagcaacccatcatactgaagccgaaaagtggaaacaggcccaacatggtggctcacgcctgtaatcccagcactttggcgtgcggatcacctgaggtgaggagttcgagaccagcctagccaacatggtgaaaccccgtctctactgaaaacacaaaaattagccaggtgcggtggtgggtgcctgtaatcccagctactcaggagactgaggcaggagagtcgcttgaacctggaaggcagaggtggcagtgagctgagatcgcgccatttcacgccagcctgaagaagtaaacgttggagggcatatgctgctggacttcaaaacccatgcctatatgaacatgtgatttgtgatacttatctgtgggttaagatggccttaaaaaggtttttttttttttaatctctttaatgtttggcttaattgaagacagctggattcttacagctacttctgcagtcaactgcttgcaatatgttgctgtaattgacgtgcacaaagaaaatccaacctcaggcccataattggaaaagagggagtattttaatagaccttaaaataatataatttctttaatattacaccaaatttgacaagtggtaatttcttaaaggttgttacaatgtgaaaacaatctatatggaatttttcataatcagattaaaattcattaatctagtttgcattttgaacggatattttaccatgcagtttgtaacatgcatgagttacttgtaaactacaggttaacagacttatgcagatattccaacagttgacacctgtcactatacattttccaaagatcacgttctttactatcaccacccacatcattagaaaggtctttgcgtattggaaaattggtaaattcatggtggcagatacaatgttgtctcatttttagggcaaatgttatacatttattgaaatgctttcagttgtttcccctgaagtgctataattacttcatttttaagaaaatatctgcagctgggctcggtagtgtacgcctgtgatcctagcacgttgggaggcctaggcaggcggatcacttgaggtcaggagttcgagaccaggctggccaacatggtgaaaccccgtctctactaaaactacaaaaaatagccggtcgtggtgacaggcgcctgtaatcccagctacttggaggctgacgcaggagaatcgcttgaacctgggaggcggaggttgcagtgagccgggatcatgccaccgcactccagcctgggcgacggagcacgacactgtctcaaagcaaaaagcagccagtcttgcaactcaaacagctgcgatttattaaatgatctaattaaatacaatttaattttatttcttattactgttaacacccgaggaccaaaactgtgctcccgctgggacagggtccagggcttgcatatgggatgggtcagggcggccgagaacgccagcccatccgtctcccggggctcatgctcgcacttaaattttctcagaaaagccgaaagccgtgattccgatctacgaaggcgattaccaccctgagcccctgaccgtagaggtgcagatccagctgaaccagtgccgctcggcggaggaggctctgcgcatgttcgccgtgtagggcgtgggcagtaaaggctgttcccagcactcccgcctccgcttctgtcccgccgcacgcgtcggggggcgggtgtggcgccggcgtcctggggaggaggagcagcctctgcccgacccggctcgtgcggaccccaggaccgggcgcgggacgcgtgcgtccagcctccggcgctgcggagacccgcggctgggtccggggaggccccaaacccgcccccgccagaaccccgccccaaattcccacctcctccagaagccccgcccactcccgagccccgagagctccgcgcacctgggcgccatccgccctggctccgctgcacgagctccacgcccgtaccccggcgtcacgctcaggtaggttgggggccgggacgccgctgctgtgagggaggctgggtcaccgtgcagggaggggcgtcgccagggcggccgtgcctttgcaccccgcggcccgctccccggtcccccagggtccccgcgaggacgccggccccgcccgggtgcggcgcgagtctggcctcggcgggcacggctcggggcccacgggccgctcggcttcggttctccaggctggggacagaggctggagccgggcgcggtagaccccgccagcctgggccgcccgcgcccgacgcgcagcgctgctgccaaccccggcccgggggtccccgcagagtgggtctctgctgccgtcagcccttcggagactgtcgcgttgaaagaatgaaccagagttcgccccctgcccgcgccagggcgttttgggtcaccgagtcctgtggggayccgaggcggctgccgcccaaggccgagcgcagcctcaggacccgcgccccaccagacggggtcgtgcgctccgcggcgggtggagagccgggctctggggtctccgcggctcggagggcggcggggcgaggccgtgcggccagcgcctggggacgcccgcggcgggacaggggccacccgggccgcggcgcagcctgggctgaaacctcctgggacggaaccaagccacctgctgtgcgcccttctcggtgaatggcaccgccgcccgcccgggcctctcgtccacagcccgcggtgctcgcacacctgagactcatctcgcttcgaccccgccgccgccgccgcccggcatcctgagcacggagacagtctccagctgcsgttcatgcttcctccccagscttccgcagcccaccagggaaggggcggtaggagtggccttttaccaaaggtcagattctttyaccgcctctgccagacccccttgtcccccacccccgcatagatctccagggggctcagaaaactctggccggtggctcacgcctgtagtcccaacgctttgggaggccaaggcgggaggatcgcttgaggccaggagttccagaccagcccaggcaacaaaagataccacatctctacaaaaaataaattagccgggccctgcacgcctgtagtcccagctactggggaggccgaggccggaggatcgcttgaacccaggagttccaggctgcagtgagctataattgtgccactgcactagagtctgggtgacagagacactgtctcaaaaaaaaccaacaaaacccttagctctttcactagccgggctggcctcttcctactgtaaacctgctgggcccccgtctcccttctttctcccctctctcctgccctggagctgcctgactctgcccacggcctgcagagaccccaggtcttcacgcaaggtgccattcctcactcagttcttgctcaaacgtccctccatcaaggagggctttttagctacccttggctatgggatccgtcctccgcgtcagccaattctctgcattagactgtaacttctcaacatacctggttcctatgcgttttgtgctcccctctgagagggcagcgaccctgtcttgcttgccactgcatccctagcacctagcagttgcttttctggtgacggcggctgtggcagtggccaatgcggcagactggtcagaagtgaagggacaggatgacttggcagtggaggtcaaggggaggggactggggcagagggagacaccagagggacaaaaatgagaaactgaagacaggctttgctacgtggagctcgggcaggccacactggtggattctgtctcctcatccttcttttcaggtccctgggagaaatcagcacttagaacgtggtgggaaggcggggcggggtgcctcggaagccatccctgatacaagtccccagctttcctgcttcccctcttgtggtgtgtggctttgtctccctccctccctcctggaagccccgacctctgaggcaggtgtaaagggtgtgtgctttggtggccacggccaccctgtggtgctggttctcctccgagggaagcagtgcactcctggtcatcttggagacgcccaacacaggaccccacaggcaccaagctttttttgggaaatggtttcacttcccacttgaaaagccctgaatgtcagttccacacttagtgaatttgatccaagctaaactgagtctgtgcctaaaactcatcaggtgctcgagtttcctggaagaatggctgggaacgtttatggtgtcagctgtaaagtggctgcaagtccttttgggaaaaacagacccaggagtcctcagatgatggcagaggagggcaagggctggcaaagcagctgtgcttagcccatcctcaggggagggaggactctggaaagagcctgaggatacgctgagaataaaaagtccagaggccagcarggacttagcggctrgggtgcaggttaactcctgcccaactcttggggacagggacccggggctgggccctgctcaggtggctctctccttgcagggaccggcgatgctctgcaggctgtgctggctggtctcgtacagcttggctgtgctgttgctcggctgcctgctcttcctgaggaaggcggccaagcccgcaggagaccccacggcccaccagcctttctgggctcccccaacaccccgtcacagccggtgtccacccaaccacacagtgwctagcgcctctcygtccctgcctagccgtcaccgtctcttcttgacctatcgtcactgccgaaatttctctatcttgctggagccttcaggctgttccaaggataccttcttgctcctggccatcaagtcacagcctggtcacgtggagcgacgtgcggctatccgcagcacgtggggcagggtggggggatgggctaggggccggcagctgaagctggtgttcctcctaggggtggcaggatccgctcccccagcccagctgctggcctatgagagtagggagtttgatgacatcctccagtgggacttcactgaggacttcttcaacctgacgctcaaggagctgcacctgcagcgctgggtggtggctgcctgcccccaggcccatttcatgctaaagggagatgacgatgtctttgtccacgtccccaacgtgttagagttcctggatggctgggacccagcccaggacctcctggtgggagatgtcatccgccaagccctgcccaacaggaacactaaggtcaaatacttcatcccaccctcaatgtacagggccacccactacccaccctatgctggtgggggaggatatgtcatgtccagagccacagtgcggcgcctccaggctatcatggaagatgctgaactcttccccattgatgatgtctttgtgggtatgtgcctgaggmggctggggctgagccctatgcaccatgctggcttcaagacatttggaatccggcggcccctggaccccttagacccctgcctgtatagggggctcctgctggttcaccgcctcagccccctcgagatgtggaccatgtgggcactggtgacagatgaggggctcaagtgtgcagctggccccataccccagcgctgaagggtgggttgggcaacagcctgagagtggactcagtgttgattctctatcgtgatgcgaaattgatgcctgctgctctacagaaaatgccaacttggttttttaactcctctcaccctgttagctctgattaaaaacactgcaacccagctaacttgtccagcatatgttgaatgggagccaaagtgtagcaaatgctgccaggaacctgtcggggcattccgggcgctgcctggggcgctgcagtctgggacctcaaggaaggaggctgcataggaccccaggagagacgcattttctctttcagatgcaaacaaaatcttacactcttctcctttggatacaatagagaaacggaaagaaaggaaggaacaagaggcctgtgttaagtcctgttgatgttaagtcctgttgagagcaccaggtaaacactctgcaccccttctcttagtagtaataggtttttcactccttggcctcagctgtcctcacaggacagtgggggcagatcagagaacacatcagaaatacatacaaagaaatcgtacaaactggacaggttcccctccccctgccacaactggcatcccaacagagggaacaagtactaaatcatttttgacgacgtaaataagactgaaaacaggttaaacagttgctgaacttaagggcatgacaaaaaggactcctctctctgacccaggtaggcaaaatgctttgggtgtgaggtaaaaaaaatgggtaagagcagctgtacagagtggggtgaaatgttaaacagggtgcagtgcccaagggctaagaaccaggtccagcgcaagcctgagaccacaggaggcactcacagctcacaaaggcgtctcgcctgattggccagggcaggacctgccgcctcttctcggtgcacagacagtcatgccaaccctgggcagggtggcatctgcccctgctttccccactgagtggggagacagggcagtgtgctcaggccctcaatcctcacgcaggtaggcctcctgctcygactcagcccgctcctccccttcctcctgtgttttctgacggagctcttctatctgtgcttctgccagcttggtttctgctttccgggagagctggtgcacctcttccacctgcagtttcaccagctgaatgtgattcctggcggttatagaggcctgatctgcgcctgccaaaagatgggacaatcgggttgagcagccgtgcagggcgcggaaggctcatgtggacgttggcctgggggtgctgtggctgtcatctgaacccctcttggggtcactttccttgacctccctgtcttctctctctgcaaagaaacttccacctctatgttcaggtctggatttaactgacactctgtcaaaaacagcatttttcttcagctgtcagcggccaacatcacaattattaaatgcaactctcacaatcatctttatagctacagagcttttagtacagacctttgattaatttttttaactacacatcttccatttctttttgacaaagagatcatgaataaaattgtcaaagatccctttcatcaccttgactaatctttaaaggtaaaggaatgcatagaaaaatatttttttactataaatttatgtaacagcataaaaggtattaaatatgttttataattttttcacttaaacatgttttgaaggccgggcgcagtggctcacgcctctaatctcagaactttgggaagccaaggcaggcagatcacctgagggtcaggagttcgagaccagcctggctaacatggtgaacccgtctctaccaaaaatacaaaaaaaaattagccaggcatggtggcgcatgcctgtaatcccagctacttgggaggctgaggcaggagaatagcttggacccgggaggcgaaggctgaagtgagccaagatcgtgccactgcactccagcctgggcgacagactccgtctcaaaaaaaaaagaaaaaaagaaaaaaggctgggtgcagtggctcgtgcctgtaatcctagcactttgggatgccgaggtgggtggactgcctgagctcaggagttcaagaccagcctgggtaacacggtgaaaccccgtttctactaaaatacaaaaaaagtagctgggtgtggcagagtgcacctgcagtctcagctacttgggagcctgaagcaggagaattgcttgaacctgggaggcggaggttgcagtgagctgagatcgcgccacttcactccagcctaggtgagagtgaaactcgtctcccccccaaaaaaaaaaatgagctctctcattttacctgctgctagttagtgtatttcaccatctgggtatatacattttatcaattcgtctgtagaacattttgatcttactgcattaacaagaaccttcaggacaatgttgacaggtagtggagaatggcaggcatcctcctcttctaacttcgatgaaaacacttctgaaagtccacacaattaagtaggattacttaacctttattacattaagaaaattatctcttcataattgtacttagattcgaatcataaatggctactacactgaagatgttttgggcatatgttaagtggtttttctcctttaatctatggatatatcatctcaaacagtgaattatatttgtttgagaaggagtctcactctatagttttttacagtgttgaactatcattctattttgagggtaaatggctacgtttgatttacggctacattttgaagtgatactgagcttttcgttttggtgctgccctagtccagtttgggatcggggctatgctggcttcatacagtagtaagaggaggcttgtcattactttctttgcgctggtacacttacagtaacataggtattatagttttggaagatttgataaaactctcccacgaaacatcctaggccctggtgtccattttggggacatcaaaatcttcgaataccatttctacctttttttttttttttttttgagatggagtctcacttatcacccaggctggagtgcagtggcgcgatctcggctcactgtaagctccacctcccgggttcacgccattctcctgcctcagcctcctgagtagctgggactacaggtgcccaccaccatgcctaatttatttattttttttttttattttagtagagacggggtttcaccgtgttagccaggatggtcttgatctcctgacctcgtgatccacccgccttggcctcccaaagtgctgggattacaggcgtgagccaccgcgcccaggtgatatatcaactttttaaatgattttgttgtctcttccttttgtcacctggtacaaaatttactgtgtgtcttagaagagtatgtaaatttagagggagggggcaaagttttatatttagtatatatacatttgttaggtgtttaaaaaccactctgcaaaaccagcctgggaaacttagcaaaactctgtttctactaaaaataaaaaaattagctggggcatggtggtgtgcacctgtaatcccagctactggggaggctaaagtggggaggatcacttgagtccaggaggttgagactacagcaagctatgatctatgatcccaccacagcattcccgcatggaccctgtctctctcacacacacaaatctgattttcctttgtttagttaaaagtaaaaaaaaaaaaaaaaaaaaaaaaaaaaaaaaaaaatcacagacgggcacagtggctcacgcctgtaatcccagcactttgggaggctgaggcaggtggactgccttagctcaggagttcgagactagcctgggcaacatggtgaaaccccatctctaccaaaaaataaaaaagattaatcgggcgtggtggtgactgcctgtggtcccagctactcaggaggctgagacaggattgcttgaccctgggaggcagaagtaacggtgagccaagatcaaggaactgcactccaacccgggtgacagagtgagaccctgtctccaaaataaaaaacaatcacactgagctgggtgcagtggctcagctcacgcctgtgatcctagcactctggcaggccaagacgggaggatcacttgagcccatgagttcaaaatcagcctggggaacataacaagacaccaactcttaaaaaaaaaaaagaaaattagttgggctgcttgggacgctgaaatgggaagatggcttgagcccaggtcaaggctgcagtaagctgtgatcatgccattacactccagcctgggcaacagagcaagaccctgtctccaaaacaaattctgttctaatccttaatagctttaatagctttaatttttttggttgtcttgacctgcaagcgtgctcagaaaattgagtattacacacatctcagatctccttgtaattctatcagtttttgcctcattaagtacatttcatgattgataatgtcttaatgaattgttctgtcctactgattactttttatcttgaattctttgatttagctagttttagctaaattttggaacacaatctaaacgtgtcatttaataagtttatttttactgcaatcactgatgtttgaaattattcctataatttttttttttttttttttaaattacagatggagttttgccatgttggccaggctggtctcgaactcttgacctcagctgatccatctgacttggccttccaaagtgctgggatcataggtgtgaactactgcacgtggcccaattttgtattttctaattgacgggttttctttttaaacctttcctgcctcaactggagctaccaagtttcctcccactcctactaattctctttgcagtgtttaacaatgtctaatgtcaatgtgcttagcatgttttcactttcccaaatttaaaaacttgttttacactcagaacttttgaaaaaaaatcttagtagcttctctcaaaactgatttttccttcttcatagttcttccagaaagtgtatacaggtggtactttgagtctatgtctgaggatatcttttattctcactttttgatggtagttggctatacataaaatcctaggttatggatttatcgtcacctctagtgttgcggagaagatgcctgatgtttgattctacttcctttgtaggtaatctattttttcttagtagcttttgggattttgctctgaatctttttgttatgctgttactttattgttcgcttatttatttatttttgtttttttttttgagatggagtcttgctctgttgcccagggtggagtgcagtggtgtgatctctgctcactgcaagctctgcctcccaggttcacgccattctcctgcctcagcctcccgagtagctgggactacaggcacccgccaccacacatagctaatttttttgtatttttagtagagacggggttttaccatgttaaccaggatggtctttatctcctgaccacatgatccgcccacctcagcctcctaaagtgctgggattacaggcgtgagccactgcgcccggccatttttttgtttttaagacagggtcttgctttgtcaaccaggctggggtacactggcctgatcatggctcactgcagcctcgacctccagggcccaagtgatcctctcacctcagcctcccaagaagctgggactacaggcgcccatcaccatgcctggctaatttttttgtagagacagggtttcatcgtgttgtcaagtctggtctcgaactcctgagctcaagtgatccacctgcttaggcatcccgaagtgctgggattacaacaggtatgagccactgcacctggaccagatttttggttaaaaaagtgaaatcataaggccgtgcacagtgtctcatgtctgtaatcccagcagtttgagaggccaaggcgggtggatcacttgagctcaggagttcaagaccagcctggacaacatggcaaaatcctgtctctaccggaaacatataatcccagctacctgggagactgacatggtaggatcgcttgagcccagaggctaaggctgtagtaagcagtgagccatgattgtgccactgtactccagcctggtaacagagtaagaccttgtctcagggaaaaaaaaaaaaaaaattccgtttacaact

SEQ ID NO: 94644 - DNA, 21569 bp, Homo sapiens
cgctggctgccacaccagtcaccctcataatactccttgggtccgaaaaactggatcccataaccctgaaagtacgaagatgctactactcagggcgccccccaacaccaccaggaaagcccaccgtcttcccaggcacccctagagccacacaccccagcttcttccttcttcctcagccctacgtccaagcggagggtcgtgtcttagcggagtatcctgtcttttttgtttgtttgtttgtttttagacagagatccactctgtcacccaggctggagtgcagtgatgtgatctcggctcactgtaacctccgtcccccgggttcaagtgattctcctgcctcagcctcccgagaagctgggattacaaacacgcatcaccacgccctgctaatttttgtatttttaggagagacagggtttcaccatgttggccaggctggtcttgaactcctgacttcaagtgatccgcccgcctcagcctcccaaagtgctgggattacaggtgtgagccatagtgcccaccgataatgtcttgaaggatctccccatgctctgtttctctctgtccctctgctggcgcctccatgcagccagtcattaaactccctccttactgacccaccctctcctctctcatccccaccacaccatgcgccatgcagcccctacagcgccggaggactctttaaatcgcccatctaggctgggcgctgtggctcaccggctcactttaggaggctgaggtgggtggatcacttgaggtcaggagtttgagaccagcctggccaacatggtgaaaccccatctctaccaaaaatacaaaaaattagctgggcgtgatggcggcgcctgtgatcccagttactggggaggctgaggcaggagaatcacttgaacctgggagatggaggttgcagtgagctgagaatgcacggtagcctaggtgacagggtgagacgctatctcaaaaaaaaaaaaaatcgcccatctgatcatgctcgcccccctcccactcttattttgacccagaaaaatgaacataaacaccatacttagcctggcgtggtggcttacgcctataatcccagcactttgggaggccgaggcagatggatcacctgaggtcaggagttttagaccagcctgaccaacgtggcaaaaccctgtctctattaaaaatataaaaaattagctgagtgtggtggtgggcacctgtaatactagctacttgggaggctgaggcagaagaattgcttgaacccaggagtcggaggttgcagtgagcccagatcgtgccattgcactcccacctgggcaacagagcaagactgtctcaaaaaacaaacaaacaaacaaacaaaaaacaccacacttaggctgggcgctgtggctcacgcttgtaatcccagcactttgggaggccaaggcaggcggatcacaaggtcaggagatcgagaccatcctggctaacatggtgaaaacccgtctctactaaaaatacaaaaaaattagctgggtgtggtggtgggtgcccgtagtcccagctactcgggaggctgaggcaggagaaggccgtgaaccaggaggcggagcttgcagtgagccaagatcgcgccactgtactccagcctgggcaacagagaaagactccgtctcaaaaaacaaaaaacaccacacttagtgtccaaccacagggaaacaaggtctgtttgcagatcacacccgaggaggttgggttgagaagccaagtctactcctcaaaatcctgatttcccacatatccctgagggcccccgcaactcttctcctcactcctgtcccagggcagacacactctgctgttttacatctcgttccctttgctatttttttgcctcccatctttctcccttttttttcttcctggctaactcctagcatcttttagtgtcacctcctacaggaagcctgccctgaattccctctttttgagacaagtcttgctctgttgtccaggctggagtgtagtggcaccaccatagctcactataacctcagcctcctgagatcaagcaatcctcctgcctcagccttttgaaaagttgggactacagatgtgcaccacaacatctagctaattattattattatatagttttatttatttatttatttattttgagatggagtctcactctgttgcccaggctgaagtgcagtggcgtgatctcggttcactgccacctctgcctcctggcttcaagcgattctaatgtctccgtctccctagctgggactacaggtacacaccactatgcccggctaattttttttgtgttttttatttagtagagacgggggtttcaccatgttggccaggctagtctcgaactcctgacctcaagtgatacacccctgtctgcctcccaaattgctgggattacaggcgtgagccattgtgcttagccttctgtcctgaattctctaggctgggcttgatgaccttcctctgggcaccctgtgaaaacatccctcctaataccatattctacgtaaattggttattcagggctttctcttcctacttgccaataaacaatttgggagcagagaacatgaaaccctgggctctaccacttgctagctgtgtgactccaggcaagactgaaactgcctttgcaaaattatgactgagacagtgaaagagatttaatttaactgactccatcttgcttctaacctctaagctgtccatgtccattcctgggcttaagctgaactaactttgggagaaacttatagtttatagtttaaacaaagacagtaacagccctttcccgaagacctccttcttgcctggggactagattgcctttgtaggattaacattagctacaagattataaattatggtttaggagtcatgcagctggaagctacaagattctgatcctcactaaactgctcctaagatcagtgcttaagatattttgcagaccttgcacttgatggatcagctggcactacccaaatcaataaactgatttatgtgatcttgtggctccccacctaggaactgactcagggcaagaagacagctttgactccctgtgattttatctctgaccaatcagcacgcctggcttactctttcccccacccaccaagttatccttaaaaactctgcagccagaatgttccgggagactgatttgagtaataatacaacccagggccaggcgcggtggctcatgcccgtaatcttagcactttgggaggcccaggctggcggatcacctgaggtcgggagttcgagaccagcctggccaatatggagaaactctgtctctactaaaaatacaaaattagcagtgtgtggtaccacatgcctgtaatcccagctactcgggagactgaggcaggagaatcgcttgaacccaggaggcggaggttgcggtgagccgagatcacaccattgcactccagcgtggcgacaagagcgaaactccatctcaaaaaataaataaattaataataataataataaaactcaggtctcccacacagccagttctgtgttaattactctttctctattgcaattcccgtcttgatgaatcggctctgtctggggagcaagaagacagctttgactccctatgattttatctctgaccaatcagcactcctggttcactgtctttcccccacccaccaagttatccttaaaaactctgctgctggaatgttcggggagactgatttgagtaataatacaactcaaggccaggcaccggcaaggtgaaccccttgggcagttacaagacacctcatctcttcgagcttgtttgcttatcaataaaatgggcatgaagatgatgatgatgatgagctgttgctgtgagagttaactgaatattaaatgtgtttcaggccgggcgcggtggctcacgcctgtaatcccagcactttggaaggccgaggcgggcggatcacgaggtcaggggatggagaccatcctggctaacacggtgaaaccccgtctttactgaaaatacaaaaaattagccgggcgtggtggcgggcgcctgtagtcccagcaacctgggaagctgaggcaggagaatggcgtgaacccgggaggcggagctcgcagtgagccaagatggcgccactgcactccagcctgggcggcaggatgagactccctctcaaaaaaaaaaaaaaaaaaaaaagttttaaatatgtgtttcaggctcacagtagcagttgctcagttgcaatactgtttattattagtgtctctgggactgatggtgaggattcctccacacttgtgggagtagatggagggaacctgtgcccagcttgggtgtttccgggctgagcacgcgcctctggctggcttcggccccccgggaccctcctctcctgtcccctgctctcttgctcccacttttcctacctcccttttattcaggcccagcagaaaggggattctcagaaagtgatacctggggaaaagaaagccaggaaacgagggggaaaagggtggaggcgacttcgtccccacaagcctggctggctcctcgcaaccgcagggtttcgtgggctcctccctggccttctgttgcttcctgtttcctgggttttgttctgagaaactttgcaattcccccaccccttccttctcccacgagcagcacaaccctgtcctcctccctgtagacctcccctctcttttctcccaggcctctctcggcttcccctaaacacacacgcgcgcacacacacacacacacacacacacacaccccggctggcaggcctgctcaccgatttcttatcacctttccaccagcctgagtagactctcctgcactttcctgtctgttggtcaggaaggctgagggtgccgtagccgtctcgcttcccaaacttccagtccccctcatagatggctcctttcttcttccagacctgtgttcctttccctggtgacacacagatgggcaatgctgcagacatggccgccggggggtgggggtggtgtgcctgcctgagcctcaggggcccccaactagacgaatctagagagctgggacaggctctgcgcatcatcctagacaccaagtacccaggagaaggccaggaaagttccatttctttctttctttctttctttcttttttttttttgaggcagtgtctcactctgtcgcccaggctggagtgcagtggcgcgatctcagctcactgcaacctctgcctcccgggttcaggagatactcctgcctcagcctccagagtagctaggactacaggtgtgcgccaacacacttagctaattttgtgttttagtaaagatggggttccatgttggccaggcaggtctgaaactcctgacctcaagtgatatgcccacctcggtctcccaaagtgctgggattacaggcgtgagccactgcgtccggccagaggtaattctcttatttgttgattagtgtcgcatgcctgtcttttccaggagaatgtgagctgcaggagggcacagactttggtctgttttgttccctgcactgaaaaactgtgcctggaggctgggtgcagtggctcgagcctgtaatcccagcactttgggaggctgaggcgggtggatcacctgaggtcaggagttcgagaccagcctgaccaaaatggcgaaaccctgtgtctactaaaaatacaaaaattagccaggcgtggtggcaggcgcctgtaatcccagctactcaggaagctgaggcatgagaatctcttgaacctgggaggcgtgggttgcagtgagccgagatgacgtcgttgcagtgagccgagatgacgtcattgcactccagcctgggagacgagcgaaactccatctcaaaatcaaacaaacaaacaaacaaactgttcctggcatgttgtaggtgactaatacctgctaatttactgttttctctttttttttctttctttctttcttttttttttttttgagacagagtcttgctgtgttgcccaggctgaagtgcagtgttgcgatctcggctcactgcaacctccgcctcctggttcaagagattctcctgccttagccaccccagtagctagaattacaggtgcccgccaccatgcccagctaatttttgtatttttagtagagacggggttttaccatattggccaggctggtctctaactcctgacatcgtgatccgtctgccttggccacccataatactgggattgcaggcatgagccaccgcacccggcctttttttttctttctttctttctttttttttttttttaagacggagttttgctatcgttgcctgggctggagtgcaatggcacgatctcggctcactgcaacttccacctctcaggtacaagcaattcttccacctcatccccccaagtagctgggattacaggaatgcaccagcacgcctggctaattttgtattttcagtagagacgggggtctctccatgttggtcaggctggtctcgaactcccgaccttaggtgatctgtccgcctcggcttcccaaagtgctaggattacaggcgtgagccaccgcgcctggcctttttctttcttttttttagacaggatctggctgtgttggctatgctgacgtacacagctcgctgcagcctcaaccacccaggctcaaatgatccttctgcctcagcctcctgagtagctgagaccacaggtgcatgccactacacctggctaattttttaaaaaaattttatagaggcagagtctctctatgttgcccaggctggtctcaaactactgggctcaagcagtcctcctgcctaggcttcccaaagtattgggattacaggcatgaggcaccacaccaggcatttctttctttttagagatggggtcttgctatgttacccaggctggtcttgaactcttgagctaaagagattctcccttctcagcctctcgacgagctgggaatacaagcacacaccagtacaccgagcttaatacatatttaacaaaacgatgaataaaatatttgtggagtaccaatattggtcaattcatgtctgggtccttggtaacccaggaacaaattcaacattatccctctgagctttgtgaccttgaccaagtaagttaattctttgggtctctctgagcctcagatatctcagctgtaaaatgggtataagaatatcttatggsggggctgggcgcagtggctcacgcctgtaacccagcagtttgggaggccgaggcgcgctgatcacttgaggtcaggagtttgagaccagcctggccaacatagtgaaacctggtctctactaaaaatacaaaaattagctgggcgtggtggtgcttgcctgtaatcccagctactctggaggctgaggtaggagaatcacttgaatctgggaggtggaggttgcagtgagctgagatggcgccactgcactccagcttgggcgacagagtgagactgtgaaagaaagaaagagaaggagagagggagggaggaagggaggaagggaggaaggaaggaagggaagaaagaaagaaaacgtgccatttgtgacaacatggatgaatctggaggacattatgccaagtgaaataagccaagcagagaaagacaaatactgcatgattttacttatatgtggaatctaaaaagtcaaactcatagaaacagtaaaatagcaattagcaggggctggtggggtggggaaaatgtggagatgttctgtcaaagggtgcatactttttgttacaagatgtacaagatttggagacctaaggctgggcacagtggctcactcctataatcccagcaatttgggaggctgaggcaggtaaatcacttgaggctagaagttcaagactagcctgggcaacatggttaagccctgtctctactaaatatacacaaattagcctggtgtggtggcgcatgcctataatcccagctactcagtaggttgaggtaggagaattgcttgaacgtcagaggcagaggttgcagtgagtgagattgcgccactgcactccagcctggacgacagagcgagactgtctcaaaacaaacaggtcgggtgcggtggctcgtgtctgtaatcccagcactttgggaggccgaggcaggcggatgatgaggtcaggagatcgagaccatcctggccaacatggtgaaaccccgtctctactaaaaatacaaaaattagctgggcatggtggtgagcacctgtaattctagctactggggaggctaaggctggagaatctcttgaaccaggaggcggaggttgtagtgagccgagatcgcaacactgcacttcaggctgggcaagagtgagactgaaaaaaaaaaaaaacgccgggcatgatggctcacacctgtaatctcagtactttagaaggctgaagcgggcagatcacctgaggtcaggagttcaagaacagcctggccaacatagtgaaagtcccagctacttgggaggttggaggcaagagaatcatttgaacccgggtggcagaggttgcagtgatccaagatcgcaccaccgccctccagcctggcaacagagcgggactccgtctcaaaaagacaaaacaaaacaaaaacaaagatctggagacctggtgtacagcatcgttctatattaatactgtattggtgtattggatactgtacttgaaatttgctaagagaatagatcttaattgttctccccacacacaaacaaaatggtaataatgtgaggagatggatatgctaattactttgattgtactaataatttcgaaatgtagacttttttttttttttttgagacagagtttcattcttgttgctcaggctggagtgcaacggtgcaatctcggctcactgcaacctccgcctcctgggttcaagcgattctcctgtctcagcctcctgagtagctgggattacaggcatgcgccaccacgtttggctaattttgtatttttagtagagacggtgtttccccatgttggccaggctggtctccaactcacgacctcaggagatccacccatctcagcctcccaaagtgctgggattacaggcgtaagccactgcgtccggccttcgaaatgtagacttttaagaaaatatcttactacacatcttaagtatatacaatttttctttgtcaatcataccgcaataaagccgagggagaaaagattcaatttgtgagcaattacgggaccattctaattttctgaaaagaaaaacagtatctcatggggttgtttcttatcactagattccaggatatgtgtacagcacttagagcctrcaagtaggaaatacgatgtcaatgttagcctttattggttttttttatttttttattttttttttcctctctcaaatcatgggagcctttgttattatttttgcccttggggagcccatggtctggtagggcccaaccacattgtaggggctgttgggttgtttgcgtttgtcctgcccctcacttcctcctggttttatttcctttggggacaccactctcccactctaaacccccaaggtttgggtggctgactccgccccctggcaggcctacccaatcagtgtattctacccaccaggctgctgtgattgggtcagtgcaggccacctgacccaagttggtccaatgagactccgtgtaagtccatttgggccaccacacccacccgggcctgcaaggggaggaagctgacttaagaaggaactcaacgcagaggaaagcaaaatggagacatggagggagacgccaagttccagtgacattaagcccctgaatcccaccatggctgaacttgcattactgaagccctcctgagttgaatttctgcctcttgcaaatgaaagaggcctgatgaatacccacatagttcaatttcaatatacgaaggtaggcactgagatttcaatatcagaagaagggcacttggtcaaatctggggactcagagacttcctggagggggtgacgttggggccaggaagggcagtccaggcacagggaactgcatgagtaaaggcaaagaggtttgaaaatgatggttgcagccgggcgaggtggctcacgcctgtaatcgcagcactttgggaggccaaggcgggcggatcacttgaggtcgggagttcgagaccagcctggccaacatggcgaaatctcgtctctactgaagatacaaaaattaaccgggcatggtagcaggtgcctgtaatcacagctacttgggaggcaggagaatcgcttgaacccaggagcaacagagtgattggctagccaatacattgattggctaggcctgctaggggggcggagtcagcccacccgaaccttggggatttagagtgggagaggggtgtccctaaaggaaataaaaccgggaggaagtgaggggcaggacaggcgaaaacaacctgtttttttttttttttttgtagcccctaccaaaaaaaaaaaaaaaaagacactgatggatgctcatgactatgccttccgtgggtggcttcagtctctcctaccgcaggcaaatgcaggagacacatgggaatcaataggctgggaattagaggggaaaggtgctttttctctgctagtccattttgaaaaatctcatctcaattttttgatttgcccagttggattacgtgctcatttctgtgaccaaggtagcaggggcctgttattagaagaaggtgaagagtgagagcaggaggcatccaacagtcgagttaggggttgatacgcacagtatatggcctgtgctggggaaagtccctagcctaacagtactggagtacctcgtataggagtcctgagacctggttttaagatctcgcgttttctttttctttccttttttttttttttttttttttttttttgagacggtgtctcgctctgtcgcccaggctggaktgcactggcgcgatctcggctcactgcaagctccgcctcccaggttcacgccattctcctgcctcagcctcctcagtagctgggactacaggcgcccgccaccacgcccggctaattttttggattagaaaacgcgaggtcttggccgggcgcggtggctcacgcctgtaatcccggcactttggcaggctgaggcgggcgratcacgaggtcaggagttcgaggccagctaaccaacatggtgaaacctcgtctctactgaaaatacaaaaattagctgggcttggtggcgtgcatctgtaatcccagctactcaggaggctgaggcaggataatcgcttgaacctgggaggcagaagttgcagtgagccgagatcacaccattgcactccagcctgggcgacagaatgagactctgtctcaaaaaaaaaaaaaaaaaaaaaaagacctggcattttctgctactgtttgggtgactgaatcagttgagggttcggggtccagacgacccaacagaaaccatactgcactgtcttctgcagtgcagtgatgctggttgtcggaacactgaagaccctaggacagtttgaaatgctagttatttcaaatagagaaaatttaatacaggggatggaagagctgagagtctgcacaggacacagtgaggcaaaccaaaacttatcaagtaggaaaataaggggaaaaggctgggcatgatggctcacacttgtaatcccagaactttgggaggccaaggtgggcagatcacttgaggtcaggaattcgaaaccagcctggccaacatggtgaatccgtgtctcacttatttatttatttgtctttttttttcttcctttttgtggagaacggggtctcgctatattgcccaagcaggcctygaactcctgggctcaagctatctcccacctctgcctccctgagagctgggattacaggcgtgagctaccgcacctggcaagtgaatccccatctctaccagaaaatacaaaaattggctgggcgtggtggtgtgtgcctttagtcccagctacttgggaggctgaggtacaagaatcacttgaacctgggaagtggaggtttcagtgagccgagatcgcagcactgcactccatcctgggcgacagagcacaactctgtctcaaacaagacaaaactatatcaggaagtgaagaggattcctccatcctgtcactaagatgctggcagccatgtgtatcatgcagaggtatacttgcaggaggagagaaaaaaggccagccagggagaagcagatagatggagaagttgtcctaagccttccctgaggatggctccattcctgcctttctaataatttgcttttatggggtgcttcgttctcctgctggatgtctctcacctggatgtctgcaagggcctctgaggggtcttcctgcccccacctcattcacaactaaatagccagcatgggtgttatgggacatgaatcagatcatgtcattcctatgctctaaaccctccctgtgtcacagagtcaaatccaaagttcttaccatggctgacagggtcctatatgatctgactacccttcttctttaacccacaacctcttttttttttttttttttttttgagatggagattmgttcttggaaactccctggctggagtgcaatggcgcaatctcagctcactgtaacctcctcctcccaggttcaagcaattctcttatctcagcctcccaagtagctgggattacaggtgcctgccatcatgtctggtctaatttttgtatttttagtagagacggagtttcaccatgttggctaggctggtctcgaactcctgacctcaggcgatatgcctgtctcggcctcccaaagtgctgggatttcaggcataagcgaccgcgccaggactgtttatcttgaggcagagtcttgctctggcacccaggctggagtgcagtggcatgatattggctcactgtaacctccacctcctgggttcaagcaattctcctgcctcagcctccctagtggctgggattacaggcgttcaccactcgatccagctaattttttgtatttttagtagagatggggttttgccatgttggccagcctggtgttgaactcctgacctcaagtgatctgcctgcctcggcctctcaaagtgctgggattacaggtgtgagccacygtccccggcctgcaacctctctgacctcctcctcttcctcactctgtttcacccacaccgtcctcctggctgttccttgaacaccccaggtatattctctgctccagctggtcctgccaccttctatgctagttcctgcaaacatccactcagttactccctctcctccaagtctttttttttttcttttttttttggagacggagtcttgctctgtcgcccaggctggagtgcagtggcgagatctcggttcactgcaagctccgcctcctgggttcacgccattctcctgcctcagcctcccgagtagctgggactacaggcgcccactaccacagccagctaattttttgtatttttagtagagacagggtttcactgtgttagccaggatggtctcaatctcctgacctcatgatccgcccgcctcggcttcccaaagtgctgggattacaggygtgatccaccacgcccagccccacctggcccatttttgtatttttttagtagagatgggatttcaccatattggccaaggtggtcttgaactcctgacctcaggtgatctgcctgcctcggcctcccaaagtgctgggattacagatgtgagccaccacacccagcctggaactgggatcctaacccaggtttatttgactgcaaagcacttaacccagcaaggcaggagagcaggatggttaagagcacagaattgggctgggcgcagtggctaaacgcctgtaatcccagcactttgggaggccgaggcgggcggatcactcgaggtcgggagttcaagaccagcctgaccaacacggagaaaccccgtcttactaaaaatacaaaagtagccaggcgtggtggcacatgcctgtaatcccagctactctggaggctgaggcaggagaatcgcctgaactcgggaggtagaggttgcggtgagccaagatcgtgccattgcactccagcgtgggcaacaagagtgaaactccgtctaaaaaaataaaaagagcacagaatctagccaggcacagtgactcccacttgtaatcccagcaattcaggaggcttggacaggaggattgcttgagcccaggatctcgaggctgcagtgagctatgaaggcaccactgcactccagcctgtttttttgagacagagcaagaccttgtcccctcaaaaaaaaagagtacagagtctggaattgcaagactggagtgagcagcagtgccacattttaaaataaaagctcttttttctttatttttttccccagtcaggatttagtttgtatcaacaggacccctttgccccctgctggtcagacttggagccccagctcctccttgtgggatggagtagggggtcctcccttgtgcctggcgctcagccctctgcagagcatcacagctgaatgcgaagcccagaaccccactgcaagctggcttcaggggcgtggcttttcttgttgccagccagcccagtgcttaacccaggtctcagaaggcaggaactgagccccctaggtcccagagccccgggggcaggccagtttctcaagaccctctgtccactgctggtcctgagaccctcactcagttgaagtcagggctgagtttgttcagaagccccagcatgtgaaggcccccagctggcctgggccagcgctcaccctgggggagccttggggacacatctcatgtccccagtgagctctgcactctgccttcctggccctgttgcccactgtggctctgaccccactccggccgcccgtcccggagtcccactcaccgtgtttcacrttgtccttccactcgcccacatagtagtcgccattcacagcrtatacctggctccgcaggccrttcctctgggccttccrgtcccaccccttccacagggactccgacttttttgggcacttagagactggcatggtggctgcttctgcaaggctggagggtgctggaaaggggttagggacatctggggctcagygcgccccgtgtaatgccgggatcctgagctcaagtggggagagtcatgtgtgttctgagtccctggggcaggtgaacagcccttagtggggatcctttagtgctggactgacckttggttggcccctcccttgcctctcctggggccccctcccagggggtctgatggcacaattacttgggaatctagggaaaccagtagagcaggagggtttgtgatggcatcagggagaagctgcccccagggagggggtggcggtcatatatacatatatatatatatatatatwtwtttttttttatgtcttctaaatatttttatttatttatgtatttatttatttatttagagatggaatcttgctttgttgcccaggctggagtgcagtggcaccatctcggcttactacaacctctgcctcctgggttcaagtgattctcgtgcctcagcctcctaagtagctggtattacaggcgcccaccaccacgcctggctaatttttgtatttttagtagagacgggggtttcaccatgctgggcaggttggtctcaatttcctgatctcaaatgatccatccacctcagcctctccaagtgctgggattacaggcatgagccactgagccaaatatgaatccaaaatatgaacccaaaatatgggttacatattttgacaatcacacctaggagtagggaaaaataattccaggcaaagaaaataggcagagcaaaagctgggagtggggaaacaatctcaggtcctaaattctatgccgttgggattttttcttctcccatttccaaatatcacatgtactattaatctttatatgtaaattaactcacttggcagaggttgcagtaagccgagatcatgccgctgcacgccagcttggatgacagagtgagaacttttctcaagaagaaaataaaaataagttaactcactttaaaaaaatcaatacatatattgaaaaaaggagggccaggcgcagtggctcatgcctgtaatcccagcactttgggaggccgaggcgggtggatcacctgaggtcaggagttcgagaccagcctagtcaacatggtgaacccttgtctctactaaaaatacaaaaattagccaggcctggtggtacgcgcctgtaatcccagctactcaggaggctgaggcatgagaacagcttgaatccaggaggcggaggttgcagtgagccgagattgcaccattgcactacaggttgggagacagagcgagactcagtcttaaaaaataataataaaataggccgggctcagtggctcacgcctgtaatccccagcactttgggaggccgaggcggatggatcacccgaggtcaggagttcaacaccagcctggccaacatggcgaaaccctgtctgtactaaaaatacaaaaattagctgggtgtggtggcgggcgcctgtaatcccagctactcgggaggctgaggcaggagaatcgcttgaaccagggaggagaaggctgcagtgagccgagattgcaccactgcactccagcctgggcgagacagagtgagactctgtctcaaaaaaaaaaaaagactgggcgcggtggctcacgcctgtaatcccagcactttgggaggccgaggcgggtggatcacgaggtcaggagattgagaccatcctgactaacatggtgaaaccccgtctctactaaaaatacaaaagattagccgggcgtggtggcgggcgcctgtagtcccagctactcgggaggctgaggcaggagaatggcatgacccgggaggcggagcttgcaatgagccgagatcgcgccactgcactccagcctgggcaacagagcaagactccatctcaaaaaaaaaaaaaaattagaagaatggagactttacgtatcattattataaatagaaaaccagtagcaggtaccctaaggcaataataaatgtaaaaatgaaaacactgaaagaaccaatttaagtcttagctagatgctatggcttagagttgactgagctccaaggtctctgttaaaaataggaattagcaaggccgggagcggtggcacacgcctgtaatcccagcactttgggaggccgaggtgggcagatcacgaggtcgggagttcgagaccagcctggccaacatagtgaaaccgcgtctctactcaaactacaaaaattagccgggcgtggttgacgacgcctgtaatcccagctactcgggaggctgaggcaggagaatcgcttgaaaccggaaagcggatgttgcagtgagagctgagatctgccactgcactcagcctgggcaaaaagagtgaaactccgtctcaaaaaaaaaaaaaaagattagcaaatgttaaaagaggtgttaatgccatgtaatcaccagactgactcctcttggcttactcagaattgcaagagaacccagactctaataactttcttatgatgtcattgggtgttacttcacacctcatcagtgtaacctaaaatcaccctccatcccacagtttagggaacataggttctactccggaggaggctgtagtcctaacacctgagctgttgacaggaaatgaaagtcggcccaggttgttttgatgctgagtaacaaagaccggcctggcggcatgggggctgccgcctgcaatcccagcacgttgggaagctgatgcgggaggatcacatgagtccgagagttggagaccagcctgggcaaccatagtgagaccttatctctacaaaaaaaaaaaaaattagctgggcatggtggcgcaggcctgtagtcccagctgcgcgggaggctgaggtgggaagatgccttgatcctaggaggtcgggactgcagtgagctatcatccggcgccactgcattccagcctgggcgggagaccctgtctcaagggaaaaaaaaacaaaacaaaaaacccacagtggaagagggaggagccgggaaccagacggcttggggtcagtcaggagtcctgggcctgccccacctgcgcccggctcacctgcgctcacctgcgggatcgcagcatccagcctcaatgtccgtcagctgcgcgcgccgcgggcccggccggggtcgctatggcaacgcgccgccccagcctaccaaccaagcagtgcccgccccttcctgccgagacccggtagcggcaaaatttgataggcaaacttacgtcacactgttgttttgtttgttttgttttgttttgttttgttttttgagatggagtctcactctgtcgcccaggctggagtgcagtggcgcggtttcggctcactgcaacctccgcctcccggattcaagccattctccctgcttcagcctcccaagtaactgtggttataggggcttgccaccacgcccagctaattttttgtatttttagtagacacggggtttggctaggctggtcttgaactcctaacctcaagtgatccgcccacgtcgcttcccaaagtgctgggattagaggcgtgagccaccgtgcctggccgtcacactggaccttagccttgttggggtttggactgctctgagcgtctaatgggagccctagagaccccccggcccctgaagggtgcctacttattaccctccacaagtcggcttcagtcactctcggctcacaccctccaggggctaccctggtcactcagggtaaaagccacagcccttccagtggccttcaaggccctggtgatctgctcgcccctcccctttccactcacaccttgcccccccactcctggcaacccgtctctgctccagccacacacttgcttcattgctgttcctggaaaatactgggcatgttctggcctcggggcctttgcctcttttgtgcctgctgccaggacatctgttcctccggaaagcagcctggatcattcccttctctccttcagggctttattcaaaaatcaccttctcagtgaggagttcctggaatcaccctatttaaagttggaatttccatatacacttgccaaccccctcatttctgttttatgtcctctttagcacttagcaccaccacacatacaccccttatttattgtctgtctcttggaagataaactttttttttcttccaacttctattttcaataaaaatttcaaacacagaaaaaaaaataactacaatgaacacctgttaccgcctctgcctatgtttaacaattactggcattttgccctatttgaaaacagaaaagtttttgtgctttctcactgccatctctgtaggacctagaggtgtgccagacacacaaagttgttcaataaatatttgttggataaatgaatgaatgaatgaatgatgtgctttgggggactcctgctgcgggggttggtggtcctcaggttaaggattccttctagaaaggagtcagagtctcagccgggtgtggtggctcatgcctgtaatcccagcactttgggaggccaaggtgggtggatcacttgagatcaggagttcaagaccagcctggccaacatggtgaaaccccatctctactaaaaatacaaaagttagcggggcatggtgtcccacacctgtaatcccagctattcgggaggctgaggcaggagaattgcttgaaccctggagagggaggctgcagtgagccaagatcactctgggcaaaagagtgagaccctgtcaaaaaaaaaaaaaaaaagaagtaacagagagatagaggaaagagaggaagaaagagacagaggccaggtgcagtggcttacgcctgtaatcccagcactttgggaggccgaggtgggcggatcacgaggtcaggagatcgagaccatcctggctaacacggtgaaaccctgtctctactaaaaatacaaaaaattagccgggcgtggtggcgggcgcctgtagtcccagctactcgggaggctgaggcaggagaatggcatgaacccgggaggcggagcttgcagtgagtcgagatcgcgccactgcactccagcctgggcgacagagcgaagactctgtctcaaaaaaaaaaaaaaaaaaaaagaaagagaaggaaagaagaaagaaggaaagaaagaatgaagagagagaaaaagaaagcgagagagagaatgaaaaagaaggaaagaaagagagagagagaaagggaaagggaaaccagagtctccaggcatggttgtggaaatgatactttgctgtggagtgctcagcttgcctcatctgcttcccaagctgtgtgcccacagggctgtgtcctcctggaaggaccactttttctacttggcacaaggtaccgtccaggctggagacaaccctgagaggacctgctcttctggggtggggatccctctgctgtacagaagcagctctatctgctgcagaccattctgtccatgctatcccaggctgcaaccccaacactgagcacaggcctggtgcacaggtgcacagcacacacttggcaaatctctgtggaacagagaaatgggtggatatcctgtcatctgcccctttgtcctcagatccgttctttttattttatttttttattattgttttttgagacagagtcttgctctgttacccaggctggagtgcagtcgcacgatctcggctcactgcagcctccgcctcatgggttcaagggattctcccacctcagcctccagagtagctgggattacagatggcagccaccatgccctgctaatttttgtatttttagtagaggcggggtttcaccatgttgaccaggctggtctccaactcctgaacttaggtgatcatcccgcctcggcctcccaaagtgctgggattataggcgggagctactgcacccggcctcattatttttattttttatattttattttattttatttatttatttattttgagacagagtctcgctctgtcacccaggctggagtgcagtggtgcaatctcggctcactgcaagctccgcctccctggttcacgccattcttctgcctcagcctcccgagtagttgggactataggcgcccgccaccacgcctggctaattttttgtatttttagtagagacgggtttcaccgtgttagccaggatggtctcgatctcctaacctcgtgatcctcccacctcggcctcccaaagtgctgggattacaggcatgagccaccgcgccaagccttattttttattttttgttttatttatttttattttttgagacagagtctcactttgtcacccaggctggcgtgtagtggcacgatctctgctcactgcaacctctgcctcccgggttcaagtgattctcctgcctcagcctcccgagtagctaggattacaggtatgcatcaccatgcccggctaatttttgtattttttgtagagacggggt

SEQ ID NO: 94645 - DNA, 51879 bp, Homo sapiens
atcaccaggctggagtacagtggcataatcacagctcactgcagcctcaacctcctgggctcaagcaatccacctcagcctccctgggactacaggcatgagcaaccatgccacactaattattgtattttttgtagagatggggtttcgccatgttggccaggctggtctcaaacttctgagctcaagtgatccacctgcctctgcctatcaaaatgctaggattacagacatgagccaccatgcccagctcattcattacacttttttatttgtgtctattgcccctagtatgatatagctttctcagaagcagaaataatgtcattaattattttccccacagttcatctcagtgcccaacacatatgttcattaactatttgtggaataaatgaatgaattcatgaatgactgaatcaaccatacctttacagaatagatcatcctttcagatgctaaaaacacccagaataacaataggacttaaactagacaggcaatcaatgaggcaagtgtcgaagtctgcaaacaacatggggcaagaaacttgaggctgatagatataccacaaaaaaagactaaaaacgatggtagagccaggtagcataaggactgaaggaaaaaaggggtttgcacctatgtgtatgaaatcacaaagggaaacaaactgaatggtgatactgcctcccagtggcatttgagataaaggcctctatgccagagcacttttttttttttttttttttttgaaatggagtctcactctgtcgccagtctgcagtacagtggcgccatctcagctcactgcaacctccgactccccggttcaagcgattctcctgcctcagcctcccgagtagctgggactacaggcacatgccaccacgcccggctagtaatttttttgtatttttagtagagatggggtttcactatgctggccaggcttgtttcaaactcctgacctcattatctgcctgtctcggcctcccaaagtgctgggattacaggcatgagccacctggcctggcccgttcctctgaatatacttaatatacccgaggtgggctgattgcttgagcccagaagttcgagaccagcctggacaacacggtgagatcccatctctacaaaaaataaaaataacaataaatttaaaatttaacccttttcccatttgccccaagaatacttgctggcagcacttgtagctgcagcatttatccagagataactttgccgtgaaatatcttgcttttattattttcatattgctctagtattactgactttggaaacaaaagacatcattctattaacagcattctgttttcagtagtggtacttccacttacaaaatacagtaattctgatcattaaaactgtcaaatcctagaaaatgctgaattcctatgtatgatgttaacatcattctttgattaatccacaattctaattattccaatgactttaatgttagttctgtttagaaataactccaagaggccaggcgcagtggctcccacctgtaatcccagcactttgggaggatgaggtgggtgggtcgcctcaggtcaggagttcaagaccagactggccaacatggtgaaaccccatctctactaaaaatacacaaattagccgggcatgtgggcaggcacctgtaatcccagctactcaggaggctgaggcaggagaatggctcgagcctgggaggcagagggtgcagtgagccgagattgcaccactgcattccagcctgggcgactgagcgggactctacctcaaaagaaagaaagagagagaaagagagagagagagagagagaaagaaaaagaaagagaaagaaagaaagagagagagagagagaaagaactccaagaacagtttttatattttattttcacattggaaatcagtcagatttgtttcagcctcaaagagcatgcttatgtaaaattaaatgactgctggcagcgagctgcactttttccttccaaacaggaaaagcgttaaaaaaaaaaaaaaaaaaaaagaggctaggcatggtggctcacgcctgtaatcccagcactttgggaggctgaggcgggtggatcacaaggtcaggagatcgagaccatcctggctaacatggtgaaaccccatctctactaaaaaaatacaaaaaaaattagccgggcgtggtggcggacacctgtagtcccagccactcaggagactgaggcaggagaatagcgtgaacccaggagacggagcttgcagtaagccaagatcgcgtcactgcactccagcctgggcgactgaaaaagactccgtctcaaaaaaaagaaaagaaaagaaaaagaaaatagggatgatgttggcaactaccgcatagagttctcatgagggataaattcataaaatggtacctgacatcatggcaaaagctatatacaggaatacctcattttattgtgcttcactttattatgctccaaagatattgcattttttacacattgaagctttgtggcaaccctacatacagtgagtctattagtgcaatttttccaacagcatgtgtttgcttcatgtctctatgtcacattttggtaatccttgcaatatttcaaactttttcattattattgtatctgttacggtgatccgtgatcagtgatctttgaggtactattgtaattgtttgggggtgcaacgaactgtgcctatataagaagacaaacttaatcaataaatgttgtgtgtgttctgactgttctgccaatatgctgttctcctctctctctccctctcctcaggcctccctattccctaagacacaacaatattgaaactaagccaattaacaaccctacaatgacctctaagtattcaagtgacaaaaagagccccacatctctcactttaaatcaaaacgtagaaatgattaagcttagtgagaaaggaatgttgaaagctgagacagaccaaaacctaggccccttgcaccaagcaattagccaagttgtaaatacgaaggaaaagttctgtttttttgagacaggtctcagtctgttgcccaggttggagtgcagtgccctaatcttggctcactgcaccctccgcctcctgggctcaggtgatcctcccaccccagcctcccaagtagctggcaccacaggcctgcgccaccacacctggctaatttttgtagtttttgtagagatgaggtctcgctatgttgcccaggctggtctcaaactcctggactcaggcaatcctcccaccttggcctcccaaagtgctggcattacaggcgtgagccactgcactcggccttaaatttgagacagagtgttactctgtcacccaggctggagtgtaatggcacgatactggctcactgcaacctctgcctgtctgactcaagtgatcctcccacctcagcctcctgagcagctgaggccacagatgcatgccaccacaccctgttaatttttctgggcttttttgtttgtttggtttggtttggtagagacagggttttgccatgttgcccaaactggtcttgaactccctgactcaagcgatctgcccaccttggcctcccaaagagctgggattacaggtgtaagctatcaggcctggcctggaaaagttccttcccggaaaagttcctgaagaaaattacaagtgctacttcagggaacacacaaatgataggaaggtgaaacagccttattgctgatatggagaaacttttagtgtgctgaatagaagatcaaaccagccataacttcccttaagccaaagcctcacccatagcaaggttactctctttaattatatgaaagctgagacaggtgagaaagctgcagaagtttgaagccagcagaagttggttcatgaggtttaaggagagaagccatctccataagataaaagtgctagacaaggctagaggtagtggctcacacaagtaatcccagcactttaggaggccaaagcaggtggatcacttgaggccaggagtttgagaccagcctggccaacatagtgaaaccctgtctctactaaaaatacaaaagttagctgggtgtggcagtgcacacctgtaatcctagctatttgggaggctgaggcatgagaattgcttgagcctgggtgaccaaggttgcagtgagccatgattgtgccactgcattccaacctgggcgacacagcgagactctgtctcaaaaaaataagtaaaataaaataaaactatgtttttcatgtgacatgttattcatgtgactgcccactctagcccacaattgccataaggtatcattacacagtaagagtgattggcagatctccacatcaatagcagatgggttcccttcatacttgtaaagctctccatgattctgcaagcttcctataattcatattttcttatacctgggtgttctatttgagagactaaatatatgaacagcagccagaccatatataaaaacagaactctgacccacaatctacagcaacctgctggggaaaccaacccccttatctataataaacagcacaggaagcaagcttgctacaagtcagacttgtataaagtcaaactgctatctctaatgatgatcctggaggccaaacaacaacccctgtagcaatgggcccaaatgccttaactagtatcctacagcttccttaacagcttccaacataggtccaaccaaagaaagccaaacacccacccctaaaccaatcacataccgcatcctactactagttagcccaggtacagcttctccatgccaacagcctccaatcaaagaataccttgacggcttcccttttttataaagctttcctactcctctgcctgcctttgagtcctgtcaaatgcaagtgatgatggctgactcccttgctatagtaagctctgaataaatagcctatgcttttctcatttggttatttatttccacatattggatctagtaattcatgaaattccatgaagaactaatttccaaaacttttttttttttagacacggtctttctctgttgcccagactggagtgcagtggcactatcatggctcacaacagcctggacctcccaagctcgagagattgattgccccctccccccactccccgcccccaacccttcagcctctagggtagctgggactacaggcgcacgcaactacatctggctagttgtgtgtgggtgcgtgtgtgtagacagagatctcacaatgttgccccaaccggtctcgaactcctggcctcaagcgatcctcctgccttggcctcccaaagtgctgacgttacaagcatgagccaccgcacctgcctacaaacgtttttaaaagatactggtgtcggccaggcgtggtggctcacgcctgtaatcccagcactttgggaggctgaggcgggcggatcacgaggtcgggagatcgagaccatcctggctaacacgatgaaaccccgtctctactaaaaataaaaaaataaaaaaataaaaaaaaattagccgggcgtggtggctggcgcctgtagtcccagctactagggaggctgaggcaggagaatggcgtgaacccgggaggcggagcttgcagtgagccgagatcgcgccactgcactccagcctgggcaacagagcgagactctgtctcaaaaaaaaaaaaaaaaagatactggtgttatttctaaaacatccaaaaagttcacgtggagcatcctttttacttcatcttaataacctaaatcaatatgctataggtctcacatttccggagaagatcctcttcctggaatggacgcggccttctgcccacaagagcggtggccctagtgcccgaacgcgtgggcagatcgcaaactgctgcgtctcccgcagcccccgcgcgcaccaagtgggaactacaattcccggcggccccggcggactgcgggccgccgggtcagacagccgacctcggccataagcgcctgcgcagtcgcggggccgccggccgtgctgttcccgccaattcctgtggtaatccttaccgtggcgagttccgcgctcaatggagacgtttgmccccaccgagctgcccgagctgcttaaactttattaccggaggctctttccctactctcagtactatcgctggctcaactacggtggaggtgatggaggcgaggaatgggttcgggagcggagtgtgaggaggttggaggcggggtgtccttagaatgacaatatgaagcgccttytgtgcaccaggctttgtgccgcgcgccttcatttgctytctcgagcccgccccaccacttcataggtgtaaatgggccgagagaggatataataagccagcctgcggccacgctgtaaaaaaaaaaaaaaaaaaaaaaaaacagagccgccgctcctacctctgcgtggtcaggctcacattaggtgccccgtttacctgcagcggtgcccagggggttactggggcgtagcgtgaagctgctgaggcatggtttgcatcaggagcggaagagcctctctcagaggaagagaaatactttcttccttgcagctgaatttattagtgcgaatcgaggagagaggggtggcattacatatttaaaatatttatgcatctgtttcatcttttgtaccgttccctagcaaatacggaatggtaactgctttcaaattagggactaggtcatgtggattttgttttgtttttcttttacatctaccacggtgttgagcatagggggctcattaaaaacatcttctcgggccgagtgccgtggcttacgcctataatcccagcactttggaaagccgaggaggacggattacctgaggtcaggaattcgagaccagcctggccaacatggtgaaaccccgtttctacaaaaaatacaaaaattatctgggcatggtgggtcgcatgcctgtagtcccagctacagcctcgggaggctgaggtggtaggatcccttgaacccgggaggcggaggttgcagtgagcctttatcgagccactgcactccagtctgggcgacagagcaggaagcaagcaagattccctcaccgaaaaaaaaaacttctcattggctaaaattataatgccctgagccaaataaagtagcaaattaactttaaaatgtacatttattttgcagtgataaagaattactttcaacaccgtgaattttcattcacaytgaaagatgatatttacattcgctaccaatccttcaacaaccagagtgatctggaaaaggagatgcagaaaatgaatccatacaagattgatataggcgcagtatattctcacagagtaagaaatctttttttaatatattttgttgttttattttgtaaaccaagaatgggttgattcctcttgcgttttgagattaaatttttagagtttattctagatgaaaagccactttttaattgtttggcaagtgattaatccttttttgttctttgacgttctgcattactgatgaaatcatttgggagtgaattggttgcatttttactaggacaaaaaaaattgagtatctagctactaggaagaggaagtcgacatgatttaggaaagggaaataattagccgsgcgtggtggtacgcgcctgtaatcccagctactgaggaggctgaggcaggagaatcgcttgaacccgggaggtggaggttgcagtgagccaagatcgcgccattgcactccagtctgggcgacagagcgagacttggcctcaaaaaaaaaaaaaaagagggaaataaaagagaattacattctcttccaccatggaagttattctttttttcttttaattgtttatttttattgaggtcaaatatacatataaaacttattatctttaccacgtttaagtgtacagttcagtcataataaacatttatattctttttccttcatacccctggagttattcttgattcctctctttctcacattcccatacccattctattaggaaatccctttggctctaccataagtgtatctaaaatccagccactactaccagtgctaccaacattatcatctcatctgaattactgtaaaaacctcctaacagtttgcctttgtagaatctagagtccattgtcaatacagaagctagagtaatccttttaaaacaactcagaatctgtgattcctctgctgaaaacattctctggtggctgctcatttcactgactaaaagtccttctctccccctcattcattcctgccacactgacccttgctcaagctgtttccactgcctaaaacccatttctatacttggttcatcccctcacctccttcaaatctttgctcaaatagcaccttctcagtgaggtctactaaaacctgccactcctcccaccccctgccactggtatattctaagtaccctagaagagtgcctggcaagagacagtacactataaatatttgttgagtgaatgaacaaaccaaaattgcccttcttccccttctcaaatatatacactggtgggtggagggaatacatacatagcataatagcttttatgtggagtttttcatgttatataacttgttacttgtatcaatcctcattctttttacaaaggaggaaacaggcccagagaacttgaatagtttgcacaagctcacacacaatttctaaatgatagagctggcacttaaacccagggtttctgactctaaatcccagacccgtctctcatcatcaaagtaaggggagaagaggtaataaaaggcaggcagaaaaaaatactttggagttgttttacttcccctttataggttgagaataaaactgaaaatgaacttctaagaagggttagggtgccactctctacttccttctccttaatttctaaagggagaaaacgtctcatttttttcttgggccaagacagaagcatctatagacctttatttactttttgtgttttgttttgtgatttttgtcagttatgtatgcacatggtttacaaaatcaagtacttctattcggcttttaaaaaatctgctaccaggctgggccggtggttcacacctgtaactctagcactttgagaggctgaggcgagcagataacttgaggtcaggagttcaagaccagcctggccaacatggtaaaactctgtctctaccaaaaaatacaaaaacagccgggcacggtggcacatgcctgcagtcccagctactcaggaggctgaggcaggagaattgcttgaacccggtaggtggaggttgcagtgggtcaagatcacgccactgcactccagcctgggcgacagagtgagaccctgtctaaaaaaaattctgctacccttccccctcattttttgctacccagaagcaactactttctttctttcttttgttgagacaagtctagctctcttgcccaggctggagtgcagtggctagtctcagctcactgcaatttctgcctcccggtttcaagtgattctcccacctcagcttcccgggtagctgggattataggcgcataccaccacacttgtctaatttttgtgttttttagtagagacggggttttgccatgttggccaggctggtcacgaactcctgacctcaagtgatccacccgccttggcctcccaaaatgctgggattacaagcatgagctaccacacccagacccagaagcaaccactttcttttagctaaagcttttttttttttttttgagacagagtctcgctctgtcatccaggctggagtgcagtggcatgatctcggctcactgcagcctccgcctcccgggttcaagcgattctcctgcctcaccctcccgagtagctgggattacaggtgtgtgccaccacgcctggctaattttttgtatttttagtagagacggggtttcaccatgttagccaggttggtctcgatctcctgacctcgtgatctgcccgcctcagcctyccaaagtgctgagattacagtcgtgagccactgcgcccagccctgttcagattatttagagagaaatcttctagcttcctgcctgagttggtagtggaagagtacagaagtgggtggaaagggctgggtcttaacattccacatataaatgtctaattattcccctaatatcaatttgtaatatcaatacaacacactcttcaattgtacttgttgtccaagtccagggaccttctgttttatgctctstggaaaataattcaggtgtcttctgccagggaaatgaaagagcagtcacctagctctgcaagctaagtgtacgaatctgggtagctaactgcttcttaactatgctttgaaccaatcctccttttttttttccttcagtcaagggtggccttgaaaaatcttcctgtttttcatctcagcttcactaaacacgcacttactcattccaacaatacctggtatcacctatccctgagccttttgggggttctgaggtataaattgggttgcgcctcttatctttccttactgacagcctaagatttagttttatgaatctcctcagtaatcactcccttctgacttacagttataaaaacttatggtggaattaacctctcaggttcttttttttgagacagagtctcgctctgtcacccaggctggagtgcagtggcgtgatcttgactcacagcaacttccacctcccgggttcaatgatactcctgcttcagcttcccaagtagctgggactacaggcatatgccatcacacccggctattttttgtatctttagtagggagacagtttcaccatattggccaggctggtttcaaactcctgacctcaagtgatctgcccgcctcagcctctcaaagtgctgggattacaggcatgagccactgtgcccagcttctcatagcctctttataataaagtctcaattcaaactaattggggagatctttttgaattattgaaaaattttaaatacttctatgtatggtaacaagtaaaggttcttaaaacaccttgcaataggccattatttgtatacgttcccttgtcagaaaactaaaaacagctttattattatccttattgaccaacaaacatttatgatggatatgtattcattaaaccctgctttaagttggtgaaagttaagactytcatcaatagtgtatgtgtaagatccaaaataatgaactttcactgtcataaagttggcattatatagtctctttatttctgtttggcaactttttccatatgtgtagaaaataagcagatttagcagtgtggcagctcttatagaaactgatcaatattttgtatctgtagcccaatcaacacaatacagtgaagctgggagctttccaggctcaggaaaaagaactggtatttgacattgacatgacagactatgacgatgtgaggagatgttgtaggtgagcactgtgtgtcttgctgttagggtgggtggtatcactgacaatgagtaatgatgactctgctttagttctgcagacatatgtcctaagtgctggaccctcatgacaatggccatacgcatcattgacagagcattgaagggcaagtatcagcagtttctgaatggggtcaagtgtaagaatcggttttcctctgactaytattaactattagtctctgtattttgtgatcaaatctcattaatktgtgtgtgtgtgtgtgtgtgtgtgtgtgtgtgtgtgtgtgtgtgtgacgagtctcactctgtcagccaggctggagtgcagtggtacaatgtcggctcactgcaacctctgcctcctgggttcaagtgattctcctgcctcagcctcctgagtagctgggactacaggcgcacgccaccacgcccagttaatttttgtatttttagtagaggcagcgtttcaccatgttggtcaggctggtctcgaactcctgacctcgtgatctgcccacctcggcctcccagagtgctgggattacaggcgtgagctaccacacctggcctaataaaatagttttttaaaaaagaaagaaattcccagcagagagaccaggatgggtaaagagatgaagcaagaacatggggagcacaggaaacaacaagtaatttaatatacattaattaaggagtttatagatttgttttaaaacctattatttctctcttcctcagaggactttggatttaagcatcgtctctgggtatattctggaaggagaggtgttcattgttgggtctgtgatgaatcagttagaaaactgtcttctgcagtacgttctgggatagttgagtatttgagccttgtaaaggtaagatcctcttaattctaatttgcattgctttagtttctagatgttaccaagcctgatatgtttactgtcaaagaaaatgaaactatctttttttttttttttgagatggactctcactctgttgcccaggctggactgcaatggcatgatcttggctcactgcaagctctgcttcctgggtccaagcaattctcctgcctcagcctcccgagtagctgggactacaggctcctgccactgtgcccagctaaattttgtatttttagtaaagactgggtttcgccatgttggccaggctggcctagaactcctagcctcaggtgattcacccacctcagcctcccaaagtgctgggattacagacatgagccaccacactggcctaaaacttatctttaatggcattcacattgcagagtaaatgatcttaccaatagatcatttaaagtcatagtagctacatgttttaagatatttcattttattttgctataaatatcttgctttgtggcatatgtaaaataatagataaaatagatttattatatataaaataatagaacatgttaaagtttggttttggttttggtttgtttttttggttttttttgttttgttttgtttttttttgagacacggtctcaccctgtcacccaggctggagtacggtaacgtgaccacagctcactgcagccttgacctcctggtctcaagtgacccttctacctcagcctcctgagtagctgggactaaaggcatgcgccaccatgcccagccaattttttaatttttgcagaaacaaggtctcactatattgcccagggtgttcttgaactcctaaactcaaactatcctcccacttcaggctcccaaaatgctgagattacaggtgtgagccactacatccagcctacaaatttttttttttttttttgagacggagtcttgctctgttacccaggctggagtgcagtggcgctatcttggctcaccacaacctccacgtcccgggttcaagcaattctcctgtctcagcctcccaagtagctgggattacaggcacttgccaccacacccggctaatttttgtatttagccaggcgtgttggcaggtggaaacagggtttcatcatattggtcaggctggtctcgaactcctgacctcaggtgatccgcccgcctcagcctctcaaagtgctgggattacaagtgtgagccactgcgtccagccctagaaatgttttaattataattatgcatcacttaacaataaggatacatcctgagaaatacatcactttgcaaaagtcatggagtatacttacacagacccagatggtatagcctactatacatctaggctatatggtataacctattgctcctaggctacaacctgtacagcatgttactgtactcaatactgtaggcaattgtaacacaatgataggtactgatgtagctaaacatacctaaacatagaaaagtcacagtaaaaatacagtattgcaatcttatgggacccaccatctttttcttttttttttgagatggagtctcgctcttgtcaccctggctagagtgcaatgatgcgatctcggctcactgcaacctctgcctcccgagttcaagcgactctcctgcctcagcctcccgagtagctaggattacaggcatgcgccaccatgcccagctaattttttgtatttttaatagagatgggattcaggctggtcttgaactcttgacctcaggtgatccacccacctcagcctcccaaaatgctgggattacaggtgtgagccaccgtgcccaccatcttatatgcagtccatcatgactaaaatgtcgttatgctgcacatgactgtatttatattgtatacctgaagttcttttttaatgatttatttttcagggtggtcaagacgttaaaaagaaagttcacctaagtgaaaaaattcacccttttatcaggtctgttggaaaagtctccawgcactttaaggtgtctgatttaccggcatgtgcctttagagttaccttgctatcaattttcactgctgggtagcattttataataataatagctatggttaattgagtgcctattttatgctgcagtattcctaaaaggtgctttacagatgttctcattgctcttcaaaaaaaccccacaagagacttgatggtatctccatttatagataaggaaaatgagttttagagagattttataatgagcttggcatcacacgacaagttagttgttaaatttaggattcatgccctggtctgcctgactgtaaagcctactccaatgctttttccactgaattcactacttctctaggatagtggaaaaagccttatattaggagtaaaaattcctattctgccacttactatgatcttgataaaatattgacaaaatattgctgcctccatttccttatctctatgatggggagaacagcatgcactctacctgtctcacagttrtatcaatgattaagtgaaagagtaaatgtgatgcatatttgtaaactgcaaacattatatgattgttgagatattaatacaagcaattcacagtggaaagtgtaggctgcatcccacattctactactgatgtattatggtgtcctgggttggttactttctacccttattgcgtatattaaccttctaagttgtgaggtttaaaaagtaaacatttcttgtatacccattctgtgccaggttctatgtcaggttcttttcccttaaaagtgtctcatttaattatcataaccctgcacagggtagtattcccattttacctagttaagttctgaaaatgtcatgaaaataagcagtagttttccccacaatggcagcaatacctatgtggcatatgtgttactgatagtgttgggactctgttgttattgttgttcttacagaaaatctataaacataataaaaaaatactttgaagaatatgccttggttaatcaagatattctcgaaaataaagaaagctgggataagattttagcccttgttcctgaaaatatcctttcccgtgatcatttctgtgtgagctagttgttttgatctgtgatattataaatgttagacatgtctgcttgtaagttctcatatacttataagtttaatcttttttacacaaaatatctcctgtatttctggattttagtatctctggtctggaacataataaaaaatggggccatgttgcaaatcagttttctcattttggaagttggtcctagaattaacagctaaagaatggtgaattacatagtcaaaatacatgcagaccagggaaaactttacatcataccttatagttattttggcattctttctgttatatcatcactgtatttttacaggggaagatttcaatgatacaactggtgttggtttggtttggggttttttttttgttgttgttgtttttaagacggagtcttatactgtgttgcccaggctggagtgtgcagtggtgtgatcttggcttactgcaacctccgcctcccgggttcaaacaattctcctgcctcagcctcccaaatagctgggactgcaggcacacgccaccacgcccagctaatttttgtgtttttatagagacggggtctcaccatgtcagccaagctggtctcaaatgatccacccacctcagcctcccaaaatattgggaatacaggcatgagccactgtgcccggccggatacagctgttgagtttaacatttgtggggtgggttgttttgttgttgagatggagtctcactctgttgcccaggctgtagcacagtggcacaatctcagctcactgcaaccttcaccttgcagatttaagcaattttcctgcctcagcctccagagtagctaggattacagatgtgcaccaccatgccctgctgatttttctatttttagtagagatggggtttcaccatgttggccaggctggtctcgatctcctgacctcacgtgatccacccacctctgcctcccaaagtgctgggagtacaggcatgagccaccacgcccagtcaacatttatatttcaagaaatgttaataactactttctgaatatttgtaagacacccttgtggtaatacatacttaaaactaaattgttcattgatgttccctaaatgagtctgttccttaatgacccatcaccaattcatgatgaacttcaacaaagcttccaaaagtctcacaattcacttcagcgttgggagcacttgaagaaagtagccagcagatatcaggtatatgccactgaaatctgtattacagatataataatgcaattcttaattaaattgattgctttgcctagtcagttaaagatggttgaagatcgtttttttaactttctttaaagaaatcttcaacagttcctactgatcctcatgttggccttgtatctgcttttagaataacatcaaaaatgacaaatatggaccctggctggagtgggagattatgctccagtactgttttccacggctggatatcaatgtcagcaaaggaatcaatcatctactgaagagcccttttagtgttcatcctaaaacaggtactacacaaggaaactaaggaaaactaaaagaaaaatgagttgctattggctttagtaagcatggcattaggtctgaatatatataatgtctatgatttaaaggtagaagaattgctctgtcacccaatacctaagtcagttaagtagctaccagatgagtttctactatgtaactgtttttcagttgggtttctgaggttccatattagatttggagaggaccatcaaaatcttaggacaacagctctcattgtacagatgagaaaacagtggcccaagatgtaacccatccaaggtcataaaaaaaaaattgtgtgtgactgtatgtggtagcttgctcctgtaatcccagcacttgaggagggcaaggtgggcaaatcacttgagccccagagtctaacaccagcctaggccacatgtctaaacaccctttgtacaaaaaatacaaaaattagctagacgtggtggtgcatgcctgtagttccagctactcaacaggctgaggcaggaggatcacttgagcctggcaagttaagcctgcagtgagctgtgatggtgccactgcactccagcctgggcaacagagtgagaccctgtctcaaaaaaaagaaaaaaagaaagaaatgaaatgaactctactcctagcactgacaaaaacaaaaaaaaatttttttcgagaaagagtctcactctgtcacccaggctggagtgcactggtgcaatctcggctcaccgatcggctcaagcgatccttctgcctcaccctcctgagtagctggtactacaggcatgtgctaccacagccagctaatattttgtagacagggttttgccatgttgcccaggttggtcttgaactcttgagctcaagcaattcacctgccccagtctcccaaagtgctgggattacagacaagagccactgcgcccagcctcattacgtcacttttgagatgtgttaaattctatatggtatcctaggggggtattataaaagagtagaggaatttctattttatttcctaaatgctttttaaaggtgtctgacgtgggtatctgtattgatctcaaataaaccaagccaatgtaaatattatagtttcatctattttgttctattttcaggactcactaactctgagattgttctgaacttaaatatggaatatttaaatatactttatttctaaatatagaaataaaagtagggataagagcaactgggaaatagctcaacagtcttcacatttgcttattggtttttgtttttgttttttttctttccttttttttcgagacagagtcccactctgtcacccaggctggagtacagtggcgcgatcttggctcactgcagcctctgccttccaggttcaagcaattctctgcctcaccctcccaagtagctgggattacaggtacccgccaccacacccagctaatttttgtatttttagtagagacggggtttcaccatcttggccaggctggtcttgaactcctgaccttgtgatccaccctcctcagcctcccagagtgctgggattacaggcgtgagccactgcacctggctggttttttaaagagaaataaaaggcatgctggacatggtcattcacacctgtaatcccagcaactcaggaggctgaggcaagaggattgtttgaggccaggagttctgggcaacatagtgagaccccaactcaacaaaaattgaaaaactggccaggccaggagcagtagctcacgtctataatcctagcactttgggagacaactgaggtgggaggatcacttgagcccaggacatcaagcctgcagtgagctatgaccatgctactgtatgtactctagcatgggtgacaaagtgaggcattaactctaaaaaagagtaagggcacagctaatgtgaaagtaatttatatttctaaatactcttcttaacagataagtttaaccctttgtctaagccttaaataaaaattttaaccaaaaataacctgtaggagatgactataatgatttatagtccacaatcatcagtttataacttttgtgtcttacaggtcgcatmtctgtgcctattgatttgcagaaagtggaccagtttgatccatttactgttccgaccataaggtatgtttcagatcattgatcactccttgtttgtaattgttgttatgaattttaaataaattgaattagcctccttagagaagtagttgcatgggaatggtatatttggttatggaaaccaaataaggttcaaaggttagatgacgatgccctaatagaacaatacaagattttcacctgctgttatgtaagaaaaagattttaaggtcaagtaaatttaggaaattctgacttaaacagattaaaagtatcttttactacagtatttcacagtctttcatatgataatatgcatgaaaaactccaagaagagatcatggtgtttagaatatcccaaatttagctggccgcataatttttttacagtaaattttatgggattcacatgctattatacactggataatgctgatcagaaaccaacattaaacttctcttgttcgtggtgaggcgcggtggctcatgcctgtaatcccaacactttgggagggcaaagcgcgtggatcacaaggtcaagagatcgagaccatcctggccaacatggtgaaaccctgtctctactaaaaatacaaaaattagctgcgcttggtggcayatgcctgtagtcccagctacttgggaggctgaggcagaagaatcacttgaacctgggaggcggaggttgcagtgagccaagatcgcaccaccacactccggcctggcaacagagcaagactccgtctcaaaaacaaaaacaaaaacaaaattctcttgttctgttacttgcagcttcatctgccgtgaattggatgccatttccactaatgaagaggaaaaagaggagaatgaagctgaatctgatgtcaaacatagaaccagaggtaaggtaatattttgaagcttcactttaatacagggtttttatatagatatccatctgtcactccagtaattaattctctgattcaactagaatggatcagcatttgtcctggaactgcatacaatgtttgtgtcctttcttcaacagcagcccaagtggtgttattgaatccagtctgattcaacacatatttcctaagtaacttttaatgctaggatctatactgtaagattaaactatcaataagtatgaataatcagtctctgagattcaccacctatttatttaacaactattatatatgcagtactttttttctttgtttctgatgcatataggtgggttttatggtaaacatatgtctaaactgtttaccaagttgtatattcaagaatttgaagaagctggctgggcgcagtggctcacgcctgtaatcccggctctttgggaggccgaggcaggcaaatcacttgaggtcaggagttcaagaccagcctggccaacatggtgaaaccccaactctgctaaatatacaaaaatcaaccaggcatggtggagggcacctgtaatcccagctactcgggaagctgagtcaggagaatcgcttgaacccaggaggcaggggttgcagtgagccaagattgtgccactgcactccagcctgggcggcagagggagactgtctcaaataaacaaacaaaaaaaaagaatttgaagaagctaaggaatttctaaatcttcctgctaatggaaggcaaatctaacacctaagagatactgcaggccaggcgcgatggctcacacctgtaatcccagcactttgggaggcccaggtgggttgatcacctgaggtcctgagttcgagaccggcctgaccaacatggagaaaccctgtctatcctaaaaatacagaattagccggctgtggtggcacatgcctgtaatcccagctgctcggaaggcagaggcaggagaatcgcttgaactcaggaggtggaggttgcggtgagccaagatcacgccattgcactccagcctgggcaacaagagcaaaactccgtctcaaaaaaaaaaaaaagatgccgcatagcagcgcagcactccccaacctttttggcatcaggtaccagttttgtggaagacaatttttgcacggactgcaaagagagggggaggagttggggatggttccaggatgaaacttttttacctcagatcatcaggcattagattctgataaggagtgcgcaacctagatccctcacatgcgcagttcacaatagggttcatgctcctttgagaatttagtgcttctgctgatctaacataaggcagagctcaggcggtaatgctcgcttactgctcacctcacacctgtaatcccagcactttgggaggccgaggcaagaggagcctaggagtttgagaccaccctgggcaacacagagagaccctgtctctccaaaaaaaaaaatttagctagacatgctggcaggcacctgtggtctcagctactcaagaggctgtttgagcccaggaggttaaggctgcagtaagccttgaccacaccactgtactccagcctgggtgtcagagagagaccttgtctcaaaatgaaaattatgtggccgggcgcagtagctcacgcctgtaatcccagcactctgggaggtcaaggtgggtggatcacctgaggtcaggagtttgggaccagcctggccaacacggttaaaccccgtctctactaaaaatacaaaaattagccaggcatggtggtgcacacctgtagtcccagctattcaggaggctgaggcacaagaatcacttgagcccgggaggcagaggttgcagggagctgaagttgcgccactgcactccagcctgggaaacagagtgagacttcgtctcaaaaaaaaaaaagtataatttctttcttactctttttaaagaactattatgaggattcttaattccatgcaaacgtaggatactactaaaatccaaattttatgtgaaactcctttcttattctcaatcatattttcccattgggtatcattataggttatataattaaatggatgaataaaattgtatattctttttttttttttttttttttttttttttttagagaaagagtcttactctgtcacccaggctggtgtgcaatggtgcaatctcagctcattgcaacctccgcctcctgggttcaagcaattctcctgcctcagcctcctgagtagctggagttacaggtgcccgccacgacgtccagctaatttttgtatttttactagagacagggtttctccatgttggtcaggctggtctcgaactcacgacctcacgtaatccacctgcctcggcctcccaaagtgctgggattataggcatgagccaccgcaccctgcctatattaaattttttgttgtatacattttttaaactattttataaatcaaagaatacttaatgcaggccaggcgtagtggctgatgcctgtaggcccagcactttgggagcctgaggcgggtggatcacctgaggtcaggagttcaagaccagcctggccaacatggcgaaaccccatctttactaaaaatacaaaaattatctgggcgtcgtggcgggcgcctataatcctagctactcgggaggctgaggcagaagaatcgcttgaacccaggaggtggaggttgcaataagccgagattgccccactgcactccagcctgggagacagagcaagactccatctcaaaaaaaaaaaaacaagaatactcaatgtaaaaacttctaataatctccaaaagggcgtgaccagagcctgagcaacacaagaccttgtctctactaaaaataaaaaattagccagctgtggtggcactccctgtgatcccagctacttgggaggctgaggtgggaggatcatttaagccagggaagtcaaagctgcagtgagctgcaattgcaccactgcattctagcctgggcaaaaaagcaagacagtgtctcaaaaataagacatggggccgggcacggtggctcacgcctgtaatcccagcactttgggagactgaggcaggtggatcacgaggtcaagagatcaaaaccatcttggacagcatggtgaaaccccgtctctactaaaaatacaaaaacttagccgggcatggtggcacacacctatagtcccagctactcaggaggctgaggcaggagaatcgcttgaactcgggaggcggaggttcccgagccaagattgcaccactgcataccagcctggcaacagagcaagactcaaaaataaaggcatggaccgggcgcggtggctcacgcctgtaatcccagcactttgggaggccaaagtgggtgaatcatgaggtcaggagtttgagaccagcctggccaacatggtgaaaccctatctctactaaaaatacaaaaaattagctcattgtggtggcgggcacctataatcccagctagtcgggaggctgaggtaggagaattgcttgaacctgggaggcggaagttgcagtaagccgagatcgcaccattgcactccagcctgggcaacagagtgacactctgtctcaaaaaaaaaaaaaaagaaaatatatgtatatatattatatatatatatatataaatataaaagacttgtatgaaagagagtatcatatatctcaatttttattacatgcaaaaataatattttagctgggcatggtggcatgtgtctgtaatcccagcactttcagaggccgaggctgggagatcactcgagctcaggagttcaagactagcctgagcaacagagtgagacctcgtctctacaaataccaaaaaaaaaaaaaaaattggttgggcatggtggtacatgcctgtagttatagctactcaggaagcagagatgggaagatcccttgagcccagtagatcgaggctgcagtgagccaagacggaaccactgtacttcagtctgcatgacagagtgaaatcctgtctcagtaataatttcaccttttttaatgtgactaatatagtatttaaaagtatgtatgtttctctcatatttcaattgggcagccctagagaattcttataagaaacttagttgtgttttcatgttattcttgctgccagtatgctaattataatgtacattcttcataatttagattataagaagaccagtctagcaccttatgtgaaagtttttgaacattttcttgaaaatctggataaatcccgaaaaggagaacttcttaagaagagtggtaagacgctatgcctttcccttctatctagttagatcttattattagtagaaatgagcaatttttgagttctagtctttctttgccctcctcccaaaatttacagatttatcttactatccttaatgttttggaaattgaggttccttaattcaatttaacacatagttattaaacacattctaagtatcaggtctataagggagacaaagatgaattaacatcatgcctccttgcccttaagaagtactaacttggccaggcacggtggctcacgcctgtaatcccagcactttgggagaccaaggcagttggatcacttgaggtcaggagttcgagaccagcctggccaacatggtgaaaccctgtttctactaaaaatacaaaaaattagctgggcgtggtggcaggcacctgtaatcccagctactcaggaggccgagacatgagaatcgcttgaaccggggaggcagaggttgcagtgagctgagatcacaccatcgcactccagcctgggcaacagagcaagactccatctcaaaaaaaaaaaagaagtactaacttaatacaaaaaaaaaagtacaaaatgctaagaaagagattttatctgatggactctgagatttcatatgaaaatggtggtatctgaactcctttcagtgtagctgctgtaagaattctaatccctagccgggtgcagtggctcacacctgtaatcccagcactttgggatgctgaggcaggtggatcgcctgaggtgaggagttcaaaacaagcctagccaacatagtaaaaccccatctctactaaaaatacaaaaaattagctgggtgtggtggtgggagcctgtaatcccagctactagggaggctgaggcaggagaatcacttgaacccaggaggcagaggttgcagtgagcygaaattgtgccatcgcactccagcctgggcaacaagagcaaaactccgtctcaaaaaaaaaaaaaaaccctaggccggacacggtggctcacacctgtaatcctagcactttgggaggccaaagcaggtggatcacctgaggtcaggagttcaagaccagcctggccaacacggtgaaaccccgtctctactaaaaatacaaaaattagccgggcgtggtattgtgcgcctgtaatcccagctacttgggaggctgaggcaggagaatcacttgaagctgggaggtggaggttgcagtgagccaagatcgcaccattgcactccagcctgggcaacagagcaagacactatctcaaaaaaaaaaaaaatttctaatccctaatgccaatatactataccataaggtatgagaaggatttccacaagcagaaatatgataagataagggtatggaggtggaaaaaggccaagggttgttcattcttgaaggaacatcaagagcaaagacagacaggaaagcatccagttactctggaagccatcaagtagtacagctaatctagtatatggtgtgtccagaagtgatgggctataaatccaaagaagcaaactgaatggccttgaattccaagcttatgtgtttgggcttggttttgggcttaataggaagcttttaaaagttctgaggaagggaatgccatgatttgtagtttttatctagaaagataaatctgggcaagacagggactagaatagagcccaagaggccaactgcgctattgccactagaacagtagcactggagatctccgaaaggtgcaaatactggaaccatccttgagacttgctaatgatttagaagtgaagagakgaaagatggaagggaaaatgttatagaagccaggggaaagaaaagtgcaagattatcaagtgtcaggtacagtaggaaactaataaaatcctgctgcatataataactggaaagaaacacaaagaggatagcagtgtcaaatgaagggtactctaaatgggagacatatgagcatatgtataagccaatatgaaaaaaatcagcagattgaatattattcaagagatgaaggctactctagaaaactgtgacaatgttayagcaatacaaattatcttgccacttcattttttatttaaatatgtgatagtttaagcagtagtgcctaagataatgctctactcagtagacactcatatgtgtgattattggatgaacaacaactctgagcttggaaagcctggttgaagctgccattgcaactggccgtattaagtcctttgtatcctcactgttccatactagctcagcctatgatgtggacttcagcaaatgtgtaagcaaatctttgtgcatgatgtgtgttaaatagaagcattaggcaaaaaagaatgtaaaagtaaatgggctttgttttgtttcctttgctgttcttccatatattatctattctattttagatttacaaaaagatttctgaagacagagctcctcaaaccattgtggatatcttctgccttcaaccacagatcaaatacttcaagagccatttaataaatatggcagaactatatatgtgtcttaaacctcaaagtaaattttccttgagaaataatttatgttgaaaagatttcctggccaagtgcagtggctcacacccgtaatcccagcactttgggaggccgaggcaggcggatcacctgaggtcagtagttcgagactagcctggccaacatggtgaaacccccgtctctactaaaactacaaaaatcagtcgggtgtggtggtgcatacagtaatcctagctacttgggaggctgaggcaggagaattgcttgaacccaggaggcagaggttgcagtgagctgagatcacagccactgggcgacagagcgagactccatctcaaaaaagaaacaaaacaaaaaaaaaagtaagatttcctgagacgaccaaggagagtgtcaaggttcctggaaggagaaataaaaggaggcataagtggattgcagataattttgtaaaattcaatattctacaaggataattctaaggcttctgatataaatacccagttctactagttgccatatatagaggtaagtgagcagtaataggactgtcatctcagctcacttgatacgtcatatgtttgggtgaatgatggttttgtccttaagttttagacatttaattatatctagagggccaggcacagtggctcatacctgtaatcccaacactttgggaggccaagacaggcagatcacctgaggccaggagttcttttttttttttttttttttttgagacagagtcttgctctgtcacccaggctggagtgcagtggcgcgatctcggctcactgcaagctccgcctcccgggttcacgccattctcctgcctcagcctccctagtagctgggactacaggtgcccgccaccacgcccagctaattttttttgtatttttagtagagacggggtttcactatgttagccaggatggtctcgatctcctgaccttgtgatctgcctgtctcagcctcccaaagtgctgggattacaggtgtgagccaccacacccgactgaggccaggagttcaaggccagcctggccaacatggtgaaacccggtctccactaaaaatacaagaaaattagccaggtgtggtggcgggcacctgtaatcccagctactaagaaggctgaggcaagagaatcacctgaacccatgaggtggaggttacagtgagctgagatcacgccactgcactccatcctgggcaacataaataaaaattataaaataaataaaacgtattaaacttgtgaaaatacttgggactttttatgtatctaggtacttcagtttttaaagtttgattttgtgagatgggttctaatatgtccgatttctcttgccctgttttacaactaatctaaacaaaacagtcattctagtttatattctgtcttccgagaaacattgagaagcaagctgtcaggctggtgcttttaatgacaatgaaaattttccttcctttgcatttcctttaacattgtttcctctacaatcaatcttttcttatcttctggtttatatgaaacagactctataatgcagtcaacacattgattccttgacctatattttaagaaaattcctgctgggtgcagtggctcacacctataatcccagcactttgggaggccgaggcaggtagatcacttgaggtcaggaatttcagaccagcctgaccagcatggtgaaactctgtctctactaaaaatacagacctggtgatgcacgcctataatcccagccacttgaacccgggaggcagaggttgcagtgagccgagattgcaccattgcactccagcctgggcaataagagtgaaactccgtctcaaaaaaaggaaaattcctcgttgtttggttttttcgtttgtttatttgtttgtttttgagccagagtctcactctgtcatctaggctggagtgcagtggagcaatccgcctccctgcaacctccacctcccaggttcaagcgattctcctgcctcagcttcccgagtagctgggactgcaggtgcacgccgccacgcccagctgattttttgtatttttagtagagacaggttttcaccatgttgcccaggctggtgtcgaactcctgagcttgggcaatccacctgccttggcctcccaggtgtgagccacctcacctggcccaaaaactcttcattatttgagcttatgtgtactataggttattaagtcttcaggttctagaaacagtgggtcgattaaaactcctgaatacaaaattactagagactcattattccagaactaatcagtaaagaactcagaaggagagtggaaagactggtatgcttttaaaaagagactttttttttttttttttttttttgagacggagtctcactctgtggcccaggctagagtgcagtggcgccatctcggctcactacaaactccacctcccaggttcgcgccattctcctgtctcagcctcgtgagtagctgggattacaggtgcgtgccatcatgcccagctaattttttgtatttttagtagagatggggtttcaccgtgttagccaggatggtctcgatctcctgacctcgtgatccacccgcctcggcctcccaaagtgctgggattacaggcgtgagccaccacgcccggcctcaaaaagagacattttcagctttcattatcattttataaatatgtctagcattgaagtgccttaactcctgggctcaagggatcctcgtgcctcagcttctggagtagctgggactacagatatgcgccaccttgccaggcttacgttttattttgttgtggagacggggtcttgccatcttacccaggctggtctctaattcctgagttaagcagttcacctgccttggcctcccaaactgctgagattacaggtgtgagccacggcgcccagccaatgtttagttcttaaagacagcaaaaatatacccaaggactactgacttccccttttcttgatttgccaattcagtcacatattagaactgtagaaacaaaggggcaaagaaatggcttctatcttcaaaattgccaacttaagaaacacgctagccgggtgtggtggctcacacctgtaatcccagcattttaggaggcagagtgggcagatcacttgaggccaggagttcaagaccagcctgggcaacatggcaaaaccccgtctctacaaaaaatacaaaaattaactgggtgtggtgttgtgtgcctgtagttccagctactcgggaggctgaggtgggagaatcgtttatgcccaggaggcggaggctgcagtgagccataatcaccccactgtactctagcctgggcaacagagccagaccctgtctcaaaaaaaaaaaaggaaaaaaaaatacatccttccttggctagtcattactacagagagaggaaaaagtaagtgggcttgctggggaagaaagaaaaattgtgaatatgtagttttgtctaaggaaattggctatttctggtccttctgaaggtaaatggactaaaggactgcattgaaaatcttccagatcatgtatttattaggtagaaattgattatgtctacaatttaatagtaacaaactttttaagttttatgtaaagattacatgggataattttatgagatagactgtttctttttccttccaattagagtgtgagtgtgtgtgtgtatatatacacacagactaatttaatcttccaaacaatcctatcaagcagctactatttttcccattttacagatcaggaaactgacatgaatatatatataggttaattgcctaaactgacctaatagatttagacaaaggagtcttatttcagagtctgtctttaatgactccacaatattgcctctcctatttgaggaggatttcagaatttcccattcctggtaaaccccactatctcacttaattttaattcaccaatcctaatcctcatttcactacgctaaggatttcagaaatgttaaagtagctttcaaagcattttaaattttcactgcttcccttaaaaggcggccacaccaggtatggtggctcacacctgtaatcctagcactatgggaggccgaagcgggtggattgcctgagctcaggagttcgagaccagcctgggcaacacggtgaaacaggagaagttttgtggcaggagaattgccagaatccgggaggtggaggttgcagtaagctgagatcgcgccactgcactccagcctgggtgacagcgagactccgtctcaaaaaaaaaaaaaaaaaaaaggtggccacagtcgtcttaaagctattaaatcaggccaggcatagtggctcacacctgtaatcccagcactttgggaggctgaggcaggcggataacctacggtcaggagtccgggcggggaggcgggtacctataatcccagctactctggaggctgagacgagaatcgcttgaacccgggaggccgaggttgcagtaagccgagatcgcgccactgcactccagcctgggcgacagagcgagactccgcctcaaaaaataaataaatgttgactggtttagctaattcaggtacagcaaatatttgttgagttcttttgtagggctgtgggaagatatgggaggcttttcattaacacaacactgattttacattctacttttcaaaaatacagttgtacaaagcatggtttaaggtggggtcccagacacctagaataaataagcttagaatatccaagaagtgccaggggcggtagttcacgcctgtaatcccagcactttgggaggccgaggcaggcggatcacctgaagtcaggaggagaccagcctggccaacatggagaaagcccgtctctactaaaaatacaaaaaatagactggcgtggtggcgcatgcctgtaatcccagctacccgggaggctgaggcaggagaatcgcttgacccgggaaggggaggttgcagtgagccgagatcgtgcctttgcaccccagcctgggcaataaaagtgagactgtcccaaaaacaaaacaaacaggctgggcatggtggctcacgcctgtaatcccagtagtttgggaggccgaggcaggcggattacctgaggtcaggagttcaagaccagcctggccaacatggtgaaacccgtctctactaaaaataaaaaattagccgggggtggtggcacacacctgtaatcccagctactcgggaggctgaggcgggacaactgcttgagccctggaggcggagattgcagtgagccgagatcgtgccactgcactctagcctggccgacagagcgactcaaaaaaaaaaaaaaaaaatccaagaagtgcccaaaatagcaagcaaaggaattgtatatgtgcctatgttctttttttctgggaaggagaatctgcagctttataatttcaacatcggctaaattgtcgtgaacctaaaacaatcaaaagggccggaatctatttaaagagtttattcaagggcagtgtgaggatggaccaaccagaaaacctccaaagaatggagtcagccttcagaagtagagaagttacgatttcatttatttagggagacagaggagtttttagctggattacgttatccatacaaggttggaacataattacagaatttggttacaagaagtgtttttttttggggggggggcgggggtacagctaacattgttttacgaagagtttaacacgcatgagttgctgtcatctggtgacatcgtttgagtctctctagtcattgaacagaacaagaaaaatcgaattaaatttataatctgaactgaagttatatgtgacccatcacatctctcaagttttaaaatgggtttttttgttgttgttgatggggggggagagggtccagcagcttttaaatgttttcacatcgtgtgttccaaaaataactggttagcctaagtcacttccaccctccaatgttgtgaatgcagtctctagcattcgctatttaatgtcttcttcctgcactatttgagaaatcgcgaggtcgacttaataccgcagtcgccacttcgcggaccggagggcggagtctgcttagttctgaggactgcgtgggtccgcgcagagagctcctgctaggcctgcgcgtcccgttctaaattcttaccctttagttcttgtcaccacccccgccgtgggaacggcctgacagtcactcgtcaaaggaagtggctgccggcagctcttgacccggaatcggatcctagtcccaccccctccgctccaggcttccttctgcaacaggcgtgggtcacgctctcgctcggtctttctgccgccatcttggttccgcgttccctgcacagtaagtactttctgtgccgctactgtctatccgcagccatccgcctttctttcgggctaagccgccccggggactgagagttaaggagagttggaggctttactgggccacagggttcctactcgcccctgggcctccggacaaaatggggtctgcggttggtgtcctggcaaaagcagggtagaagggctgcggggcgggcccagaatccgagcctgcagagatgggagcagttgcagtgttgagggcggaagaggagtgcgtcttgttttgggaactgcttcacaggatccagaaaagggtaaggggtcacagccttagaacctgtaacaccgttctccctgtgacaagcaagtgttggacttaaaacaccgtctttcccctcctggtaccccaaagtcggcaaacgtagtccaggaggccccagcccagccagtgtgagtattaggagtggagggggttcacagtagcgtctgaagtctcccatgatcgagagccagcccgggatcctctccctcgggttgagaatgcagtgggaattgctggccttgatagaggcgtgagggtcacatcatatttacctcttattcccaggtgctttggggaaggttgtcaccaaacaccctcacgatttttttctaacagccctcctcggagtttttaagaatacttatctccgggttgggcaagtgaatgtatcccaatcaatttaggcctcctttttattcccttccttcagaaatgcccggcgaagccacagaaaccgtccctgctacagagcaggagttgccgcagccccaggctgagacaggtaggtttccctaccctccttgccattaattaaaattaaccctaaagccatttggtgggcaaaatgaccaaggggaaatacactttttaggaggatggggttgcagctttaccaaggaggatagaccgtaaaattactatcctggagatacttctttagggatttggagtaaaaataatatttttaagattcgtggacgttaaaagtaccctagcttgctttctatgttatgcctgtcgcctcaaaagaagctctcctgtggaacccccacctcacataggaaaactcagcagggaatgggctcagtgattcttacctattggaactagatgacacaggccaaggagcccggagcatttgtgaaactccagccagcaagttgcatcaaggttttagttagcagagcttggcattgtgcctttatcacatgtctggatgagatgtgtgctggtggtaaatgtgtcctactgggccccagagtcgtcctaggtcggataacttgtttatgggttggtggtgctgagatacttctagtgtgctggaatagttcctgcatcattgtgtgaaacccaggattgaaataaatccttttatcctcagcgtcgaaattaacgactgtgaaggctaattttaaattctggttaaaacatatctctgtagaaaacttaggaggaggtaatgaaaagttcttaaaatgatagcctttctgagtcagttgtgcagcgttaaatgaaggaaatcttcaggctgtaattttcattctcacctttttggttttttttaaatttcatttgttatttaagggcaattcctgtccctttttggagttacagtagagttgcttatagttgaaagcataaagtttcttcccacctgtttgattttaacagctgaagggattaatacagctgctaggaaggacaatagggggctctaagctggagtataaacaatatgaaattcttgaagtacaaggggcttaaggaagggaaaaaataaagtactgttctctaaagattctgtaatttcagtacaaaacgagattttagagattgtgtcattgaacaacttaattttacaaatacgaagatttgaaattcagatgaatttagaataatctgattcaagcttcaaaactaatgcatttacttctgaaacagtccttaatgctattaaacgtattcctgaatagtctgagttgcatagtaggcttatattaaggaagtaccaatgataaatacacaaggttttatctgtaatgatagtctattagaatgaagaaggaagctcaaggaattgttgatggtgtcaaagcaagtatttgagtgcttattccatttgaggtccagtcagaagaaaacatattccatgtttttaattctgattcattatgtttggtagtgttttcctgtaatcgttagactttggcctacccactctccaggaaaaactagttgagccaccttgtcttttccatggtaggatgccataagaacttcagaattactggttgagtgaattttgaatttgaattttggtaccacgggcttcccccccgccccccttaacattcccttctaagcattgagcatttgttgatccaattctgtgttacctcctgaatgccagagatactgtcttactgtcatgccaaacattggtgtattttgacataatgaaacacttaaattccaagttaaggagtggggatccagtgtattctcgccactccaattgtcttctttggtttgttttttttgttttgttttgtagacggagtctcaccctgtcacccaggctggagtgcatgcagtagcgcgatcttggctcactgcaacctccacctcctgggttcaagccattctcctgcctctgcctcctgagtagctggtattacaggtgtacaccaccacgcccagctaatttttgtatttttagtagagacggggtttcaccatgttggtcaggtcggtctggaactcctgacctcgtgatccgccctcccaggcatcccgaagtgctgggattacaggcatgagccactgttacaggctctccaattctcttcttccaaaatagcaccacaatctggtttaacaagttaggttacagtttcataatacagtccctacccttgtgagtaagctctctgcctggaggtctaattcatgtctaattcatcttggattgatgtctgaagaattaacatcacctaggaaggtttatagagactattacagtccttttgtggttggttttcttgtttgggttttgtgagtaagtaaactggtaaggtataaagaagctaagtgactttaatacttgatattaaattctgaagtgtttcaactttaggaagaactgaattgtgctgtgcacctccttcccaaaactattctaacagagtcagatgtttcctagcctagtggaagcctgaaagtataaaagcctgtgttttcttattcagttcagattccccatcatcgtcactgctcactaacttctttgttccagttttcagtatcttttctgttcatgatatttgggtggacagagtagcacagctgttcttctcgtgggaattctgttggctgtgagaaagacttgggaatacagtccatttcaagaagtaaggggagggcacaactgggaaaggatagaaagcatgttgttctcaacctaccaagagtctgtgctccccatttagagataggctgctcttagactgttctcctcaccctaaaatagttggtttactttggtagaacttggggaagtgtgagaaattaggaggggaatgtcttctcacttgaccactgaaaaatgtttggggaaggttgttgttgcctgtcacctttatctaatcctgcgtggtgacttagactgtcagattttaaactccagtgtttcctaggaggcatgttgtaccaagttgggctgcataactcaccttttttctcctccccctccccctttctttatctccttttgcctttctccagctgtgctacctatgtcttcagccttgagtgtcactgctgccttagggcagcctggacctaccctcccccctccttgctctcctgccccacaacagtgccctctctcagctgctaaccaggcttccccattcccttccccctctactattgcctcgacccctttagaagttccttttccccagtcatcctctggaacagccctacctttgggaactgcccctgaagccccaaccttcctaccaaacctaatagggcctcccatctccccagctgccttagctctagcctctcccatgatagctccaactctgaaagggaccccttcctcttcagctcccttagctctggttgccctggctccccactcagttcagaagagttctgcttttccacctaaccttcttacttcacctccttcagtggctgtagctgagtcagggtcagtgataactctgtcagctcccattgctccctcagaaccaaagactaatcttaataaagttccctctgaggtagtccctaatccaaaaggcacccccagccctccatgtatagtcagtactgttccttaccactgtgtgactcccatggcctctattcaatctggagtggcctcccttcctcagacaacacccacaactaccctagccatcgcttcccctcaagtcaaagataccaccatttcctcagttctgatttctccacaaaacccaggaagcctcagcctgaaggggcctgttagtccacctgctgccttatctctttcaactcagtctcttcctgtggtgacctcttctcaaaagactgcgggtcccaacacccccccagattttcccatttctctgggctctcatcttgcacctttacatcagagttcttttggttctgtccaacttttaggtcaaacaggtcctagtgctttgtcagaccctacagagaagaccatttctgtagatcattcttccacaggggcctcttatccttctcagagatctgtaattcctccccttccttccagaaatgaggtagttcctgctactgtggctgcctttccagtggtggctccatctgttgacaaaggtccctctaccatctctagcataacctgcagcccttctggctccttaaatgtagctacctcttcttcattatctcctacaacctctctcattctcaaaagctctcctaatgccacttatcattatcctttagtggcccaaatgcccgtttcttctgttggaaccaccccacttgtggtgactaacccctgtacaattgctgcagcacctactactacctttgaggtagctacttgtgtttctcctccaatgtcatcaggtcccataagtaacatagaaccaacttcccctgctgccttggttatggcacctgtggctcccaaagagccttctactcaagtagcaaccactctgaggataccagtctctcctcctctgccagaccctgaagacctcaaaaatctccccagttcagtattggttaaatttccaacacaaaaagacctccaaactgtacctgcctctcttgaaggagcccctttctctccagcccaagcaggactcaccaccaagaaagaccctactgtattaccgttagtccaggcagcccctaaaaattccccttctttccaaagtacatcctcttctccagagatacctctttctcctgaagccaccctagcaaagaaaagccttggggagcctctccctataggtaagccagccagcagtatgacctcccctctgggtgttaactcctcggcctctgtaatcaagacagattcttatgcaggcccagactctgctggtccgcttctcaaaagttctctcattaccccaacagtggctgcatttcctttggaaagtgctgaccctgccggggtggctcccacaactgccaaaggtacctcaacttatacaactacagccagcccttttctagaaggaactgtctctttagctcctaaaaaccacccagttaaggaaggtactcttactactttacccttggttcctacagcttcagaaaattgccctgtggctccatccccccagaatacctgtgctcctctggctaccttagtgctggcccctgaaatcccaaagtctgtgccctcaccctctcttcccccagctgggactcctccaggtacaaaaaaggttgatggtatttctcatacttcagcattggcacctgttgcttcctctcccaaagagtgcccaactgaggactctggtgcttctgctactgcatcttccaaaggaactctgacttacctagctgattccccatctcctttaggggttagtgtgtctcctcagactaaaagacctccaaccaagaagggttctgctggccctgatactcctattggaaatctctcatcccctgtttctccagttgaagcttcatttcttccagagaatagtctttctttccaaggctctaaagactcaccagccacgacgcattctcccactcctccatcccccaaaggggcccctactccctcagctgtgactcctctgtctcccaaaggagtaacactaccccccaaagagacccccactccttcagtggtgaatttgcccttccccaaagagggtccagctactccagcacccaaacaggctcctgctctatccatgacttcttcctcccccaaaaaggcccgagcaactccagccctaaaggaatcccagcttccccatcccccaaaggggcccccacacccccagctgcaactcctccctcccctaaaggaggcccagctaccccatccccgaaatgggcccccacacccccagctgcaactcctccctccccaaaaggaggtccagctactccatcccccaaaggggcccccacacccccagctgcaactcctccctcccccaaaggaggtccagctactccatcccccaaaggggcccccacacccccagctgtgactcctccctcccccaaaggaagtccagcagctaccccattccccaaaggggcatccacacccccagctgcaactcctccctcccccaaaggaagtccagcagctaccccactccccaaaggggcccccacaaccccagctgcaactcttccctccccaaaaggaggtccagctaccccatccctcaagggggcccccactcccccagctgcgactcctccctccccaaaaggaggcccagctaccccatcccccaaaggggcccccatgcccccagctgcaactcctccctccccaaaaggaggtctagctaccccaccccacaaaggggcacccacaaccccagctgcaactcctccctccccaaaaggaggtctagctaccccacccccaaaaggggcccccacaaccccagctgcaactcctccttccccaaaaggaggtctagctaccccacccccaaaaggggcccccacaaccccagctgcaactcctccttccccaaaaggaggtctagctaccccatcccccaaaggggcccccacaaccccagctgcaactcctccctccccaaaaggaggtctggctaccccatcccccaaaggggcccccacaaccccagctgcaactcctccctccccaaaaggaggcccagctaccccaccccccaaaggggcccccactcccccagctgcaactcctccctccctaaaaggaggtctagctaccccaccccacaaaggggcccccaatcccgcagttgtaactcctccctctccaaaaggaggcccagctacctcaccccccaaaggggcccccactcctccagctgcaactcctccctccccaaaaggaagcccaggtaccccaccccccaaaggggcccccactcccccagctgtaactcctccctcccctaaagggacccctactctcccagctacaactccctcctctaaaggaggcccaactactccatcctccaaagagggccccactcccccagctgcaaccccctcccacaaaggaggtcccgctatgactcctccctcccccaaaagaggaccagctatcccatctcccaaaggggaccccacttccccagcagtgattcctctctcccccaaaaaggctccagcaactccagtcaccagagaaggcgcagccaccccatccaaaggagatctcactcccccagcagtgactcctgtctccctcaaaaaggccccagcaacttcagcccccaaaggaggcccagctaccccatcctccaaaggggatcccaccctcccagcagtgactcctccttcccccaaggagcccccagcccccaaacaagttgccacttcttcctctcccaaaaaggccccagcaactccagcccccatgggggcccccactctgccagctgtgattccttcttcccccaaagaggtcccagctaccccatcctccagaagggaccccattgccccaacagcgactcttctctctaaaaagaccccagcaactctagcccccaaagaggccctcattcccccagctatgactgttccctcccctaaaaagaccccagcaattccaacccccaaagaagccccagctaccccatcctccaaagaggcctccagtcccccagcagtgactccttccacttacaaaggggccccatcccccaaagagctcctcattccaccagctgtgacttctccttcccccaaagaggcacctactcctccagctgtgactcctccatcccccgaaaagggcccagcaactccagcccccaaagggactcccacttccccacctgtgactccttcctccctcaaagactcccctacttccccagcttctgtcacatgtaaaatgggggccactgttcctcaagcatctaaagggcttccagcaaagaaaggccccacagctctgaaagaagtacttgttgccccagctccagaaagcacgccaatcatcacagctcccactcggaaaggtccacagaccaaaaagagttctgctacttcacctcctatatgcccagatccctcagctaagaatggttctaaaggacccctttccacagtggctccagcccctctactccctgttcagaaagactcttcaaagacagcaaaaggcaaagatgcttctcattccccaaagggccccttggctcctcctgagtctaaggcgtccacccctctaacagcagctgcctttgagaaggtccttcctaaacctgaatcagcatctgtctctgcagcacccaccccaccagtctctctgcctcttgctccctccccagttcccactctgcctcctaaacagcaatttctgccgtcctctcctgggctggtgttggaatcaccctctaaaccccttgcccctgctgatgaggatgagctgccgcctctgattcccccggaaccaatctctgggggagtgcctttccagtcggtcctcgtcaacatgcccacccctaaatctgctggaatccctgtcccaaccccctctgccaagcaacctgttacgaagaacaacaagggtatttgccttggtttgccgtgtgcatggtgtgtctgtcgtccacacccctcttgggcgctacccaccaatactaaccctgtgatgcgccgctttctccagtgaatctgcttgggtttggatgtagaacatagaatgataattttaaatgcaaaagttctaggaatatgaaaccaaatcttggttttcattacttcagatagatacatagtacattgtgtatcatttttgtgtaatgtggccgggactaccctgagcctgccatgccatctattttacctaattgatctgacattgaaaaccaagacctgccagaccttttcatttgctctaatccctaccacatcactaactaaccttgtccctgggcctgagatttggtaaaattattggagaattgaactatttgtatttatttttccattattagacttagtaatgaccagttgcccagggactcccttttcataaaaatgtagaaatctgtttttcctagcctgaaaatggtgcaggtgtatgctttttttcctcagtagtctttactgatgcttggcctttgaattgaaagaaatttatgtgaattatgtttggaaaaactagagatataggtcatcatcattgagaatcttctaattatattgattagatcacattgctggggtgaatggtttgaaaatgaggctgaatatgtgtacgtgtctgcttttgacttcctccaacccagtttaaaagttgaggggaaaaccacccaacctgttgtgcctccacggtgtgattttggttttttcacttaagtgtatctgggggcaccttctgacagaactttacagggataattggactattgggtaaaattttagagtcatatgggtcattatttgcctgtgccaagaaacaaagaccttgagggaaagaaagcagttacagtatattaaactgctcagctatttctagtgattactcctcatttctggggttagggctgggtctttactagatgtgtacccgctagttagtgactaagttaggggctatcaagctgacttcacacaagccagttggtttacatttaacattcttaggtctagcatgaggcattcacctctagtccagggcaggctgtggtgaagtaccttctcttataatttctactataaagcagtaaaagttgtttctcatcttagggtctggaacagaatctgacagtgatgaatcagtaccagagcttgaagaacaggattccacccaggcaaccacacaacaagcccaggtgggtattctcttactaactggtattgggtcaaagaagcagggttgatcagggcaacttttgtatttggaactgtgaaccttcataaaggaaaacccacaaggagattgtgctatccagatcttagattctggttaactaatagctgttttatcttcttagctggcggcagcagctgaaatcgatgaagaaccagtcagtaaagcaaaacagagtcggagtgaaaagaaggcacggaaggtaagatttgaaaaggatttcaggatcttatgaagcacctttatacagagtggaactgtttatttccataggtttttggggaacaggtggtattttggttatacaagtaagttctctagtggtgatttttgagattttggtgcacctgtcacccaagcagtatacactgaacccaattcttagtagtggtagaatcccgttgaaagtaacagaagtagctaggttggtggctcacacctgttatcccagcacactggaaggccaaggcagatggatcacttgaggtcaggagttcaagaccagcctggccaacatggcgaaaccccatctctactaaaaataccaaaaatatatagcagggcatggtggtaacgctcctgtaatcccagctactaaggtggctgaggcacggcaattgcttgaacctgggagacggacattacattgagccgagattgcaccactgcactccagcctgggcgacagagcaagacctgcctccaaaaaataaaaaataaagtaacagaagttactacggcagaaaacccattctctattcttgtatgaacttttctcagcctggggaaaggctttgctttggatgttgtattatgttccttgcttctttaggctgcttctaaagaggttgaaaacctgatactattttctcttctttaggctatgtccaaactgggtcttcggcaggttacaggagttactagagtcactatccggaaatctaagaatatcctctttgtcatcacaaaaccagatgtctacaagagccctgcttcagatacttacatagtttttggggaagccaaggtgagtaaacttttcttgggcattgttccagaccagggtttctcaacctcagcactgctgacattttgcgtcagatagttctctgttatggaagggctatccattacatccagttttgattacccaaaaactccattgccatatatctcctgggagacctaactaccccctagttgagaaccactgctctaaacctaaacaactactctttctactgtgagggcaagcagtttaaagctgtacaataagttacctgaatgggtttacagagagttgtgaaactatatgatttatttttcaaagactgctaatctactcacatggatctgtattttctaccctgtagatcgaagatttatcccagcaagcacaactagcagctgctgagaaattcaaagttcaaggtgaagctgtctcaaacattcaagaaaacacacagactccaactgtacaagaggagagtgaagaggaagaggtatactaggaaatctttcataatttaactctcgctgtatagcattgtgttcgtgttggtgagctatattaaaaactagattcaggagactccaaagaactgctgaaattgttcttgcctttaatttactgctttttccctctcatctctcaggtcgatgaaacaggtgtagaagttaaggacatagaattggtcatgtcacaagcaaatgtgtcgagagcaaaggcagtccgagccctgaagaacaacagtaatgatattgtaaatgcgattatggtaagtgttcaagcctttgttccttgactccctctgccctgaccaattatgagtgactttattttgtcttgctaaatatcagccaattaaggaacctcattccagagcctcttctgagttgccgtataggttttagtggcctaaattctcctgatttgcctgtaagagttttagtgacctgaattctcctgatttgcctataagaaccgctaattatcttttctctgttacaggaattaacaatgtaaccatatggaagcaactttttttggtgtctcaaaggagtaactgcagcttggtttgaaatttgtactgtttctatcataaataaagttatggcttcttgttggatgaattcagtcggtgactggtctcttccccgccacccccccacaccaaaaaaaaaaaaaacttaaaaaggttctagtaatttattaattactcctaaggcctccctcatttgataaggtttagtgccacagatttcccacttagaatctcagactttatacctcttttaagaagttactggccaggcgtggtggctcacgcctgtaatcctggcactttgggaggccaaggagggggcagatcacgaggtcaggagattgagaccatcctggctaacacggtgaaaccccgtctccactaaaaatacaaaaaattagccgggcgtggtggcgggcacctgtagtcccagctgcttgggaggctgaggcaggagaatggtgtgaacctgggaggcagagcttgcagtgagcccagatcacgccactgcactccagcctgggcgacagacagagcaagactccatctcaaaaaaaaaaaaaaaaaaaaaaaagttactatactaggctgttaggaccttcttaacttaaggaaatacaacttgactataaagtttctcatttctgaccaggcgcgacggctcacacctgtaatcccaacactttgggaggccaaggcaggtggatctctttagcccaggaatttgacaccagcctgggaaacatggcaaaaccccgcctctacaaaaaataggatcactgagtaatccctgagatcacaccactgcactccagcctgggcgacagagtgagacactgtctcaaaaaaatagtttctcatttccactttctttcccagatgttaactgttagcagatcccgattcttctgtatctagtaatcagccccttcactgaactccaatctttctgaatgcacactggggcttttgtggcctctgaggagtttacattggttacatatcgacatgtaagagcttggtacagggttgaagagaaagttggaggtacatgaaaaagctacctcctgaaggggaagattttgagtatattgtaaactttctgctcttaagcatattctctacagacattttaatctacaaagtagcttctgattaggacagccataattacatattaggacaataaatgaaaactaggactctcccaggctaactaaaacataacagttagtttacagatagctacataggaattccaagaaaaactcagtttgggttgtcagagaatggtttggaggaaatcaaagggctacaatttagaaatgggaaagttacaagtaaatgtagaggcaagaatcctgaaatgaacatgtgaaaatacacctagaaggaatatgttagaatgggaataaatgtggctaacatctaaaactgggctttagaactaaaggagttaagacatttttatagaattcagtcttttggtctccataaaaaatgaggccggccgggtacagtggctcacacctgtaatcccaccaacttgggaggctgaggcaggcagggcaggcgggtcacaaggtcaggagatccaaaccattctggctaacacagtgaaaccccatctctactaaaaataacaaaaaaaagggcagcgcggtggctcatgcctgtaatcccagcagtttgggaggccgaggcgggtggatcacgaggtcaggggtttgagaccagcctgaccaacatggtgaaaccccgtctctactaaaaacagaaaaattagctgggcgtggtggcgggcgcctataatcccagctactcaggaggctaaggcaggagaattgcttgaacccgggaggcagaggttgcagtgagtcaagatcgcgccactacactccagcctgggcgacagcgagactccgtctcaaaaaaaaaaaaaaaaaatacaaaaaaaattagctgggcatggtggcatgcgtctgtagtcccagctactcgggaggctgaggcaggagaatcgcttgaacccaggaggtagaggttgcagtgagccgagatggcaccattgcactccagcctaggtgacaaagcaagactcccatctcaaaaaaaaaaaaaaaaaacagaggccaaggagggtggcttctgcctgaaatcccaacactttgggagtacaggcaggaagatcctttgagcccacgagttcaaaaccagcttgggcaacatacagagaccttgcctctacaaaaactaaaaatactagctaggtgtgatattgtgcactttggttccagctactaaggaggctgaggtgggaggatcacttgagcctgctcccttgaccctgctcccttgaccctgggtggtcaaggctacagtgagccatgatcgcgccactacattccaacctgggccacaagatgccatctcaaaaaaaaaaagaaaaaaaaaggcattattttagtagatgtgagtgaaagctgaggactaaggagtttatgactttctcaaagccactaaaaacagcagggccttttgtttcccccagctaggaagtagtaggctgtactgtgggagcacaaatagaaatctgaagattggctcagaatgaagacctttcatctcatttcaaaacagttgattatttgatgaacaaaatctcatgagaaaaaaggcgcctaacagccaatctgagtcaatccaataattatttcaggaagaaatttagatactcattcccaatttttttaaaaacaactatcttgttcaagaccctttttgcatcactgcagtagtgttcactacttcccacctcaagaatctcacaacatcagttcccccttttcttctgctattaattcctacctctcagtctttcttatttatttaattttttgagatgcagacttgctctgtcgctcaggctggaatgcagtggcacaatctcagctcactgccacgtctacctcccaggttcaagcaattctgcctcagcctcccaagtagctgagattagaggcccacaccacacgcccagcaaatttttgtatttttaatagagacaaggcttcaccatgttgtccaggctggtctcaaactcctgacctcaaatgatcctcctgcctcgacctcccagagtgctgggattataggcctgagctaccgcaacgggccttcctctcagtcttttgcttcaccacaattgaaatgcagataacttcctctattactagaatgattaaatttttggttcttggagtcaagcagagtggctcatgcctggctaagagttcaaaacgaccctggccgacatgacgaaaccaagaaatacaaaaattagctgaacatgttggcgcacacctgtagtcccagctacttgggaggctgaggcacaagaattgcttgaacctgggaggcggaggttacagtgagccaagatcacaccactgcactgtagcctgggtgacagaaaaaataaaaaactattagatgacaccaaaagcaagaaaacaagcaacaaaagaaaaaaagataaattggacttcatcaaaatttaaaacttgtgtattaaagaacaaaacagtaagaaagacagcccatggaattagaggaaatatttgcaaatgatgtatctgataaggggataatatccagactatataaagaactcctacaactcaacaaaaactctgattcaaaatgtgaaagggccatgaagacatttatccaaagaagatagataaatgtccaatagcacatgaaaaggtgctagggccgggcgcagtggctcacacctgtaatttcagcactttgggaggctgaggcaggcggatcatctgaggtcaggagttcgagaacaacctgaccaacatggagaaaccccatctctactaaaaatacaaaattagccgggcatggtggcctatgcctataatcccagctactcaggaggctgaggcaggagaatggcttgaacctgggaggcagaggttgcagtgagccgagatcacaccattgcactccagccagggcaacaagagcaaaactccatctcaaaaaaaggagaaaaggccaggcacggtggctcatgcctataatcccagcactttgggaggccaaggtgggcggagcacctgaggttgggagttcgagaccagcctgaccaacatggagaaagcccatctctactaaaaataaaaaattagctgggtgtggtggcgcatgtctgtaatcccagctaccagggaggctgtggcaggagaatcgcttgaacccaggaagtggaggttgtgatgagtcgagatcgcaccattgcactccagcctgggcaacgagagcgaaactgcacctcaaaaaaaaaaaagaaagaaaaaaatgtaattaaaacaaaaaatgagatgtcacctcaacccattaggctgactacttatcaaaaaaaaaaagtgttagcaaggatgtgaagaaattggaacacttgtgcactgttggtgggaatgttaaatggtgcagccactatggaatggtatggcagatcctcaaaaaattaaaaatagatttaccatatgatcccgcaattccacttctggttttaaacccaaaagaattacaatcagggactcagtgttacaaccatactcataacagcattattcacaatagacaaaggcagcagaaacccaagtgtccatcaacagttgaatggttaaataagatgtggtatatagcaacaggagaatattattcggccgggcgcagtggctcatgcctgtaatcccagcactttgggaagccaggatcgcttggcctgggagtataaaggatcgtttgagctcaggacttttgagactagcctgggcaaaatggcgaatctcagcactttgggaggccgaggcgggcagatcgcctgaggtcaggagttcgagacctgcctggccaacgtagtgacaccccttctctactaaaaatacaacaattagccaagtgtggtggcacatgcctgtagtcccagctactcaggagtctgaggtagtagaatcacttgaacctgggaggcagaggttgcagtgagccaagatcacaccactgtactactcactccagccagggagacagagttagactccatccccccccccaaaaaaaaaaaggcaaaacactgtctctacaaaaaaaaccacacacgccaggcactggggctcacgcctataatcccagcactttgggagaccaaggcggatggatcacctgaggtcaggagttcaagaccagcctggccaacacgatgaaaccctggtcactactaaaaatacaaaaatgagccaggcatggttgtggacgtctataatcccgctacttgggaagctgaggcagaagaatcacttaaacccaggaggcagaggttgcagtgagccaagatcataccattgcactccagcctgggcaataagagcgaaactccatctaaaacacacacacacacacacacacacacacacacacacacaaaattacaaaattagccaggcatggtgggacgtcccagctactagggaggcggaggtgggaggatcccttgaccctgggaggcagaggttgtagtgagccatgatcacaccactacactccaccctgggtgacaaagtgagatcctgtgtcaaaaaaatatataagactgggcatggtggctcacgcctgtaatcccaacactctggcaggccgaggcaggcagatcacctgaggtcaggaattcaagaccagcctggccaacatggtgaaaccctgtctctacaaaaatacagaacaaaattagccaggtggctgaggcacaagaatcacttcaacctgggaggtggaggttgcagtgagctgacacagcaccactgcactccagcctgggcgacagagcgagactctgtctcaaaaaaaaaaaacaaaattagccaggtgtggttgcctatgcccctaatcccagctacttcggaggctgaggcaggagagtcctttgatcccgggaggctgaggttgcagtgagccaagatcatgccattgaacaccagcctggatgacaagagcaaaactccaaaactccatct

SEQ ID NO: 94646 - DNA, 17184 bp, Homo sapiens
gtctctacacacccagaggaaaaggctataagttgggagtcactgataactgccccgtctgacccaggtagtgttactagaggagtaaactcggtgccctaatcctcactccttcacccaccaccctaagcatctctactttattctgcagtcaggccctccgatcagacctaaccagaattagggagagttcatctatacaacaaacttgtgctacatacattcaggatatgttggccttagcttgagatcatgcctcttcaagacactgtgttcattcttacaagccatacaatatttactgtataggaattaaaactaagaaatgggccgggcacagtggctcatgcctgtaatcccagcactttgggagtccgaggcaggtggatcacctgaggtcgagagttcgagaccagcctgaccaacatggagaaaccctgtctctattaaaagtacaaaaattagcagggtgtggtggcgcatgtctgtaatctcagctacttgggaggctgagacgggagaatcacttgaacttggggggcggaggttgtagtgagccgagatcgtgccgttgcactccagcctgggcaacaagagtgaaattccatctcaaaaaaaaaaagaataaataaataataataataaaaatataaaaattagcttggcacctataatcccagctacttgggaggctgaggcaggagaatccatctcaaaaaatatatatatgtttttatatatacatatatgtaaatataaatatataaattatatacatataaaaatatatgtatgtatatgttgtaaatagagaagggggactctgtgttgcccaggctggtcttgaactcctgggctcacgtgatcctcccagcttggcctcccaaaatgctgagattacaggtgtcagccaccaagcctgacctttttaatttttaatttaatttaattttcatttatttttctttttttgcgtcttgctctgttgcccaggctggagtgcggtggggtgatcttgtctcattgcagttctgacccctcaggtgatccacccactttggcctcccaaagtgttgtgattacaggcatgagccaccttgcctggcctcatatatatttatatttgtttgttttgtttgttttgagacagtgtgtcgctctgtcgcccaggctggagtgcagtggcacgatcttggctcactggaagctccgcctcccgggttcacgccattctcctgcctcagcctcctgagtagctgggactacaggcgccggccaccacgcccagctaattttttgtattattagtagagacggggtttcactgtgttagccaggatggtctcgatctcctgacctcatgatccacccgcctctgcctcccaaagtgctgggattacaggcatgcgccaccacacccggctaattttgtatttctagtagagacaaggtttctccatgttggtcaggctggtctcgaactcccaacctcgggtgatccgcccgtctcggcctcccaaagtgttgggattacaggcgtcagccaccgcccccggcatatatatatatatatatatatatatatatatatatatatatatatatgtatttttttaaaatagagatggaaaaataactatttaccaaaatcaataaatatgtcgtgagaataatggcattgttttacaggggggttggggggagacactgtttttctctcctctcacaccaccacaacaatcaacaaagaaggctactgtgtgaccaaatgtgttggttttttccccagtccacaagcaagcagttccagctgggtgtcctcttgtttaatgccaacactgtctacctggagataacctcagatctcaaatgtttagggtgcagatctcaagaccgccctccccaccggccccccggtactagtttcttttctctccttttttcttttatttcttttcttttccttccttttcttttcctttctccttccttccttccttccttccttccttcctttctttcctttctttctatttctttctttgtctctttatttgtctctctctgtctctctctttcttttctctctctcttttcccctttttcttttcttctttctctctcttgtctctctctttcccctgcctccctccctccctccctcccttcctttttttttttttttaaatcaaattattgtttaccagacatggcccctgacttctgatgctagtcaaaagccccaggctgttttacctatgcctctgactgaccagctgtaaatctaggcccccacaactctacttgggcttggttaacttgctagggtggctcatagaaatcagggaaacacctacttacctttactggtttattatagaggctatttgaaaggatgcagatgaagaggtgcctagggtgaggtatgggggaagggatgtggagcttccgagccctcttccggtgtgccaccttccaggaacctccaggtgttcagctatgtggaatctctgaacccagtccttttggatttttgtggatgcttcattatgcaagcatgactgctgaaacgattggccattggtgatcaactcaacagttcagcaccccctccactccccagaagttgggggtgggctgaaaaccccaaccttccaatcatgccctgctctttatggtgaccagcccccatccggaagctacctagggcctgccagccatcagttaacattagcataccaaaaaaatcactttagagatttaggagttgtatggcagaaaatagggtcaaagaaacgtatatttcacaatatcacactgtttcgataggagacagctcgattttcacatctgcttctattagctattaggatatattgttttgattgaaatacatgaagaaaatttggtctcacacagacatgtaactagaagagcacttcaccaatcccctgaaaggttcttttggggaccacaacttcagaattgctgttctgagctttcaggctctacgtgcacacactttgaggagcagacacaacaatccttgtcattgctttggtgtcttttttatccaaagtttcagtctcaggcagtagagtttacagtagtgaagaatgcgactttcccaggtgtgagggctcacacttgttatcccaacactttgggagacaaaagcaagaggatcacttgaggccagaagttcaagactagcctggtcaacagagtaagacccacatctctgcaaaaaawaaaaaattacccgcgcatggtgacccatacctgtagctggggaatgcaatgagcactccagcctggcagcctgggtgacagaatgagaccctttctcaagaaaaaaaaaaaggtgggggccgggcgcagtggctcaggcctgtaatcccagcattttgggaggctgaggcagatggattacctaaggtcagaagttcgagaccagcctggccaacatggtgaaacctggtctctactaaaaatacaaaaaaaaaaaaaattagctgggcgtggtggtgggcgcctgtaatcccagctacttgggaggctgaggcaggagaatcacttgaatctgggaggcggaggttgcagcgagccgagattgcaccactaagttccagcctaggcgacagagtgagactccaactcaaaaaaaaaaagaaagaaagaaaaaagaaaaaaaaaaggaacacaagctttggagcaggtcagctattcatacccaaatacctccccttaatctttttctggcttatgtataaggtaggaataataatagtatcagtgtcaacctaaaataatccgacgggtcagaacctaatttagagttttttcaagtgcgaagtatgagaatggaacacctggaaccaccaactccagaagaatggagtcagtgttgtgaagtaagaaagttaagatttcatttatataggcaagcacacatgactttttagcaggattacatttttcacagaagattggtacatagttatagcaatttggttggctatagacaatgtttctttttgggaagtatacatgtaactttttttttccaatttttttttatttggagtttcgcactgttgcctgggctggagtgcagtgtcaagatcttgcctaactgcaacctccgcctcccgggttcaagacattcttctgcctcagcctctggagtagctgggattacaggcacctgccaccacacacggctaattttttgtatttttagtagagatgggttttcactattttggccaggctggtcttgaacttctgatctcgtgatttgcatgtaactttttttttttttttttttttttttttttttgagagggagtcagccgggcgcggtggctcacgcctgtaatcccagcactttgggaggccgaggtgggcggatcacctgaggtcgggagttcgagaccagcctgaccaacatggagaaaccccgtctctattaaaaaaaaaaaaagagagagggagtcttgctctgcatcccaggctgaagtgcagtggagcgatctcggctctttgcaatctcagcttcccgggttcaagcaattgtcctgccccagcctccccagtagccgagtagccgggattacaggcatgagccaccagtgcccggcgcatgtaacattttttaacagaggatgaaatagtcatggatttcctacacttcagcctgggcgacacagcaagactccgtctcaaaaaaaaaaaaaaaaaaaaaaagagttaatctataatctgagaacagaagttgtaaactatatgtgactcgcagtcatatctctctcgaggcttaaagtgttttttgggcttccaatagctcttaaatttttttttttttttgagactccgtcttgctttgtcgccaggctggagtgcagtggcgcgatctcaactcactgcaccctccgcctcccgggttcaagcgattctcctgcctcagcctcctgagtagctgggactacagacgcctgccaccacgcccggccaattttttgtatttttagtagagacggggtttcgccatgttagccaggatggtctcaatctcctgacctcatgatctgcccgcctcggcctctcaaagtgctggtattacaggcgtaaaccacagcgcccggcctaaatttcattattttctgtagcttcttggccttttggctaaggctcgtaaacattttttttttatttctacaccaatttctgtagattattatgagaattaagggagagaattatatcaagcgcttagcacagtgtctggcatctaggaagaaagtagtaagtgatagcatttatttatttatttattttatttattgagatggagtttcgctcttgttgcccaggcatctaggaagaaagcagtaagtggtagcatttatcaatctatctatctatctatctatctatctattatctatctatctatctatctatctatctatctatctatctatctatctgttgagatggagtttcgctcttgttgcccaggctggagttcagtggcaagatctcgggccgcctcccaggttcaagcaattcagatagttgccgaccgggcgcggtggctcactcctgtaatcccaacactttgggaggccgaggtgggtggatcacctgaggttgggagtttgagaccagcctgaccaacatggagaaaccccatctctactaaaaatacaaaattagtcaggtgtggtggcacatgcctttaatcccagctactcgggaggatgaggcaggagaatcgcttgaacccgggaggcggaggttgcagtgagccgagatcgcgccactgcactccagcctgggcaacagagggagactccgcctcaaaaaaaaaagttgtcgtttgatggctggggggcgggggtgaggggcggggcttagtggttctcgcccacgacggcgaggcccaatcagacccgcggagctggtggagttccgccctcgcggaggaggtggtgttccgccctcctagtcgcagcaagcgcggaactggggttgcggcgtctaagtgtttccggtggattcccagggactgtcggaggtgtggactctgcctgcctacctggtctgggaagatgttctaccatgtgagcagggctcagggtggcggcaagggctgggtggaaaggaagagcaaggccaggcgccggcgcgagactccccttgtcgtccaataacctgccagcgcctggcctggtcgccatcccacttttctccgcagatctccctagagcacgaaatcctgctgcacccgcgctacttcggccccaacttgctcaacacggtgaagcagaagctcttcaccgaggtggaggggacctgcacagggaagtgagtgtcgagctcaccgcaccgccagatcgttcgatgcgcacacggggcgctatacctgcaacccctccccaactcctactcgtcctgccacccactctggggacccctctcctctctcaggcagccagttgcttcctgctttgggttcccagrgcgccctctgcaatgctggacaataagacttccttctctcagctgagatgggtcattcattgactcctcaaacattttaaaaacccttggtgtgtgccaggacccgtgttgggctcagaacaaggtagaatgggaacaagatagaatgaggacagcccctgtggagctcacagtgtaatcattgttcctgtgtctgctctccctctgtcattctgctggttttctcttatcccctgtgcccagggaccacacaccatgggcctctatatatcttctgaatgaatgaccagaaaaagcagatcgagagtttgggggaggaaggaagtagcctgggatttgaccatctctgggctttgcacagaggggcctctctgatattaatgagctgggacccagctcagggcagtggagtacttgggcctccagcatcagaaaaacctgcaggaacatgcagattcctgagcctccttattccctacagaatcaagactgtctggggcagacctgagaatctgcattttaagaagatgattctcaggcatcccgaagattgagatctgttgcctcaaggactccagccttcttggacatttattgtgaaattaccagaacagcatttggtcttacacatactgatctctgttctgtcttcttttggtcattaagctctctgggagcagaggtgctatctacttgtccttttgctctccccgaccctacccccaagagctcagcgacttttattgcagatgtctttagaggctcttggacacacagtgtcttcctgtttctcatcctccttgcaggtatggctttgtaattgctgtcaccaccattgacaatattggtgctggtgtgatccagccaggccgaggctttgtcctttatccagttaagtacaaggccattgttttccggccatttaaaggggaggtcgtggatgctgttgtcactcaggtcaacaaggtgagaccatacataggggaggcagtggggtagtctctcggaagatctgggttgggttctggctccacttcataactctgtgcctttggctaagtcacttcactttttttttttttttttttttttgagagagttttgctctgttgcccaggctggagtgcagtggtgcgatcttggccactgccacctctgcctcctaggttcaagtgattctcctgcctcggcctcccaagtagttgggactaaaggcacgtgccaccatggccggctatttttttttttttttgagacggagtctcgctttgtcacccaggctggtgtgcagtggcgagatctccactcactgcaagctccgcctcccgggttcacaccattctcctgcctcagcctcccaagtagctgggtctacaggtgcccaccaccacgcccggctaattttttgtatttttagtacagacggggtttcactgtgttagccaggatggtctcgatctcctgacctcgtgatccacccgcctcggcctcccaaagtgctgggattgcaggcttgagccaccgcgcccggcctgcactttcaaattatatggtaatcttgycctgcctaactcagagggcaagagagtcagtattaatagtcataacaataaaagcctgtgttgattgagtagttactatgggctaggtgatgtgcagagactcacaatgactctaaaaggtgggtttttttttttttttgagacggagtctagctctgttgccaggctggagtgcagtggcgcaatctcggctcgctgcaacctccgcctctgggttcaagcgattcccctgcctcagcctcccaactagctgggactataggcatgcgccaccatgcccagctaatttttgtatttttagtagagatggggtttctccatgttggtcaggctggtctcgaactcccgacctcaggtgatctgcctggctcagccacccaaagtgctgggattataggcgtgagccaccgtgcccggccagtgggtgctttttacagaagctgaagcttggaagaarttaagtgtactggccaagatcatgtggccaacaggtgttcaaatcttggactaacacgtcccaggcctaagctctttaatactttaaaatgaaagcttaggctgggcgcggtgactcacatctgtaatcccagcactttgggaggctgaggtgggcagatcacctgagggtgggagttcaagaccagcctggccaatatggtgaaaccccatctctactaaaaatacaaaaattagccaggcattgtggcatgtgcgtgtagtccctgctactcgggaggctgaggcatgagaatcacttgaacctgggaggtggaggttgcagtgagctgagattgcatcactgcactccagagtggagaacagagtgagattctgtctcaaagtaaatawgtaaataaatacaaatgraagcttaaaaaaaaagagaaaagggctgggtgcgctggctcacacctataatcccagtgctttggggggcagaagtgggaagattgcttgagcctaggagtttgagacagcctgggcaacatatcaagactctgtctctacaaaaagtttttaaaaattagcctagcatggtggtgtgcacctgtggtttcagcaacttgggaggctgaggtgggaggatcgcttgagcccaggagttcaaatttacagtgagctgtgatcgcaccactactttccaacctgggcaacagagtgagaccctgtctcaaaatttaaaaagcaaaaaacaaaaacacaacacttgaggggacaaagaaaaggcaagatcactcttttgttttttttttttgagacagagtcttgctctgttgccaggctgaagtgcaatggtgcaatctcggctcactgcaacctccacctcctgggttcaaacgattctcctgcctcagtctcctgagtagctgggattagaggtgcacgccaccatgcccggctaatttttgtatttttagtagagacggggtttcaccatgttggtcaggctggtctgaaactcctgacctcgtgatccaccggcctcggcctcccaaagtgctgggattacaggcgtgagccaccgtgcacggccgtaagatcactcattttttttctaggttggactcttcacagaaattgggcccatgtcttgcttcatctctcgacatgtaagtctgggcacactgggtggggctgaggaagacagatactcattcatcaccatctattgaagcatccatttaaagtgctaacctagatctyactttcctttcagtccatcccttcagagatggagtttgatcctaactccaacccaccatgttacaagacaatggatgaggtgagtggacagaaagaagtcagggagacaaggagagaatcagccatcctgagggagaatattggcctggggatggctgagtacagatggtccccgaattaccatggcttgattcatgattttatgactttacgatggtgtgaaagtgatgtgcattcaatatgcccccgggcttacagtgaagtgattgtgatgtaacttctcataaactgaggagcatctgtacactgttccctcctctcctcaggatattgtgattcagcaggacgatgagatccgcttaaagattgtggggacccgtgtggacaagaatgacattgtgagtcttttccccacctctctacctataccaggttgagctgagaactgtcgatttcttttttcttttttttttttttttgagacggagtcttgctctgtcacccaggctggagtgcagtggcgcgatctcggctcactgcaagctctgcctcccgggttcatgccattctcctgcctcagcctcccgagtagctgggactacaggcgcccgccaccacacctggctaattttttatatttttagtacagacagggtttcaccatgttagccaggatggtctcgatctcctgacctaatgatccacccgactcggcctcccaaagtgctgggattacaggtgtgagccaccgcgcctggccgagagctgtcgatttcttaccacccacagtttcagggggttctgtgctcttctgccaggaagaagggatggatgggcagaaggcctggggctgcagggtggaggttggttctgtgctcatcttggcttcactttctttttaccatctttcttgcagtttgctattggctccctgatggacgattacttgggtgagtgcctgatcataggtgctggggttattgcctggagaagggatgtgtgggggtggggagtaatataggattcaatgcccaaatcagagagacagaagaaactttcatgctgtctgcttgaaagatccaggacatttgccttgggatgaggagtacatggttgtggctaccctaaattccggttctaactgatatgctttttctggtttcgcagggcttgtaagctgagcctggtggcctcctaccmttggtcctactctaggaagtgtgattgtcacacttatcatgttgtccaraggtccagtctggctgctgttgtggaggcaaggaaggcaactcatcccagaaggcawytggtgcttyttgtagcttaactactgcctcctcatttttcagtatgtgttytaagtataaaaagtccttggttctcatggaagtgttatcttctttttttttttttagcaggaacaataactctttaaagaggctgtggagttggctgcttactagcccctctttttcttagactgatgcctctactagcctcagccacccaggggaactgactaacccatttgtccaggtttaaaggtgacctcactgaagtcaaggctctgatgttgggtctttggcttccagcaaatgataccatcattagtggcattctgggtcctgatctagttccagagtgtttgctcttctcctgcccttaaaagtaaccaagagcatagctgggaaagaagggagaggagacagcagacagggagagatgaataagaggctagtaatgacacagactgtaggatctcaacacagcctttcctaagttgggtatataaacaatagtatatcactatactaaactgaactgaagatgtaaaagggctcacaatctagttagggtgacaaaaaatgtatgaaatgcctacaggattaaagaaacatgccaattttccctggcactatacctctgcaatactattttgtctaccttggaatgccctttcccagcttgtccatttcctatctactaatctatgaaatctcatttcaattattattattattttttctttaactttctttgacttccctgggaaacagagctctgtggcagaaaacaagaaagcatggtatttggattgatacagagctggtttaagtcttagctggactcaagaggataagagatgaggcaggtaaattgcttgaacccgggagggggaggttgcagtgagctgagatccctccactgcactccagcttgggcttcagagtgagactccatctcaaaaaaaaaaaaaaagaaaagaaaagagtcttagctggatgaccttctgtttcctcattataaaatgggcagaaaaccctctttggaggctgctgtatcagacatcatatgttcaagtggctggcatagagcctggtccatgatgggcactcaacttttaattatcataattattatataatgcatcccaaagccagtgcagtggtgtgtatctgtagtctcaggtacttaggaggctgaggtgggaggatcactggagtcctggagttcttcctaagttctcaaataggggaataacaccaagcctgaaaggaagaaattgatggacagagaagcagctcatggatcctgagcatgtgggtgctggtgaggatgtagggtgtggcatcgaaaaggctggcactaattaaaaaaaaaaaggaaaaaaaaaaagcctggcactctagtggggaagggaacaagtggggatgccctggagatggtttccagaactcttctgagcttttttttttttttttttttgagacagagtctcactctgtcgcccaggctggagtgcaatggtacgatcttggctcaccgaaacctccgcctcctgggttcaagggattctcctgcctcagcctcccaagtagctgggattacaggcatgtgccaccacgcccaactaattttgtatttttagtagagacaaggtatctccatgttgatcaggctggtctcaaactcctgacctcaggtgatctgcccgcctcggcctcccaaagtgctgggattacaggcatgagccgccgcgccccgcctcttctgagcttttaaggttggtactaagggattctgaaagttacagcctcctaaagcggtcacaggctaatagagtaccatgtgcttggcaacatgctaaatcctttacacacttttctgaatcttcacaacagttccatggagtagatttcgttatcccgctttatagttgatgagacaggtcagacaggtgaactaatatgcctaaggtcacacagctggtgagctgtgattttttaaaaacagtctgggcttgttgtggtggctcatgcctgtaatcccagcactttgagaggccgaggtgcgcggatcacttgaggtcaggagtttgagaacagcctagccaacatggcaaaacccagtctctactaaaaatacgacaattagccaggtatggtggtgcgtgcctgtaatcccagctactcaggaggctgaggcacaagaatcgcttgaaccggggaggtggaggttgcagtaagctgagattgctccactgcattctagccttagcaacagagcaaggactctgtctcaaaaaaaaaaaaaaaaaaaaattggccgggcatggtggctcatgcctgtaatcccagcacttcgggaagctgaggcgggcggatcacaaggtcaggagttgaagaccagcctggccaacatggcgaaaccccatctttactaaaaatacaaaacttacagcacttagccaggcatggtgtcggacacctgtaatcccagctcctccagaggctaaggcaggagaatcacttgaaactgggagggcagaggttgcagtgagctatcacgccactgcactccaacctgggcgacagagcgagactcagtttcaaaaaataaataaaaataaaaataaatgaataaaaacagtctgactttgaccaggcacagtggctcatgcctgtaatcccagcactttgggaggcagaggcgggtggatcacaaggtcaggagttggagaccagcctagccaacatggtgaaaaccctgtctctactaaaaacacaaaaattagctggtggtagtggcaagtgcctgtaatcccagctacttgggaggttgaggcaggagaatcatttgaacctgggaggtggaggttgtagtgagccaagattgcgccactgcactccagcctgggcaacagggtgttactccgtctcaaaaaaaggaaaaaagaaaaaaagtctgacaccaaagccatcatagttcttgccaggcattgggtgtgtggagcgagccacctttctcccatctgtggccatggaggtctcactactgccttccctggttcctgcctccactcagattgggagcaaatgagctccagacaggttggatacaggttcactacatctaataggtcccgggcagtcccggtctccctcccatcttctagtgtctccaaggttgctgatggctgtccagaacagtaaacctaagcaaggaggtcagccagctgcccaggtctggctaagctgacttcaggctcagtcagaccttagaggagagcgccctctctctttcccttaacgcacaggtgggcagacacttgaaaccacttctaatatggttctgaatatgagtggaagagactcagcagggtcacattctccttaggtggggttgccatggcaaccacagtcgcatccatctggctttgccagctcgggtcccaggggattttcttttccagcggcagcagcatctaaccctgagagggggaaagagaaaaaatgtgtacattcatgctcccttgcagaatgttcccacagttcactcagtgcaaactaccccatcttgggtgaacttaaaggaattcactgtatgccttgtgacatgtgagggaaagaaagtttctctcttttttttttgagacggagattcactcttgttggccaggttggagtgcagtggcgcgatctcggctcaccacaacctccgcctcccgggttcaagcaattctcctgcctcagcctcccgagtagctgcgattacaggcatgtgccaacacacccggctaattttgtatttttagttgagatggatttttctccatgttgatcaggctggtcttgaactcccgaccccaggtgatcccccgcctcggcctctcaaaatgttgggattacaggcgtgagccaccgcgcccggccgggaaagaagtttaacctccaactctgccagggactctcacagacattaatttacaacaaccctgtgaagtgcgcattattactccatattaggtaatttgcccaaaggcagtgtcagaattttaacccaggtcggtctgattccaaataccatcctttactcactaagcccactgcttatcaattaagaactgcccaagtagctgctattgcagtgggagttggagaaagagagctgtcagtgtgcgtgtccaacggtcatgcaaggcgaggtaggccagggcttgtatttggttcacaggcgtggggagaatgcgaagtaggtgcagaaagagcagaaccctggagtccggagcttgcacgggatgttcggccgggtcagaagtcccttctgcctgccgagaacacctaccgagagccccatctatcccttcaggaaggggaagtggcatgtgatgttggggaggtaggccgggcaggaaaactaagccagacaccaaaatctaaagctttgctgcagtcgcgaaaatgcgggtgctcagaaactcgcgagcaaacaagacaaagaaaatcaagacgctgtctttgagactgtttatttcctcgttactattgtggtggtaaaaaaaataaaatatgcttattaaacgtgtgttaaaacaatacacacctactcgcaaacgtagcaagagaggttgctttaagaagcgggaatcttcagcgtcacgtgaccgccggtctctacagtctgttcacactggccaatcaagagccaggaagcctcctggagggccggaaactttccaaggcgcccgccgactggctgtattggggagggcggggccggggccccgggagagggaatgagtgtgagctcgtgagtgggcgccgccgccaccrcccccgccgccgtcgtctcggtagcagccttcgccacgccggggtcttcaggtgagcaggccttgctctggtccaaggactccccattcccgacgccgactgcttactcaccagtcttggagcccgcaccgcgagggcccgcccccttggctgaccacgtgacccaagttcagtgacccctgacctcctccccccgcgcaccccctccccgatctgggctgggctaggccgggtgggaggatgcgcgttgccgaggcccggcccgcggaggtcagttcccacgcctcctctccagcgtgactagtggctgaggatgcggaggagaggaggctgaggagcgggagactttggtcacagtctagatttcgtgtacggtcatataatagggaaactccctccgtgcctttcgcgctggtggactaaatgctcccattttacagatagggaaactgcagcttcacaacgatctattggcgggtctagggtcaccaaggggtgggtctccaatccatgtctttggggtgggatccaggccttgttccccatacagctggcggctcctgaatgcggtatagagtaaagattaggagcaaggggttgagtccttgctccccctccctacttactcagtgcttacttcatgatcttggagaagtcatggaacatttagcctctgaggtttgatttccttgcctgtgaaatagacgaaatacataataatatcttattattgagaatatagtgaagtaatccatataaagcacttagctgtgtctcaggcatagtacagtgctattcgtggccgggcgcggtggctcacgcctgtaatcctagcactttgggaggccgaggcacctggattgcctgagctcaggagttcgaggccagcctgggcaacacggtgaaacctcgtctctactaaaaatacaaaaaattagctgggcatggcggcgtatgcctgtagtcctagctactcgggaggctgaggcaggagaattgcttgaaccagggaggcagaggttgtagtgagccgagatcacgccactgtactccagcctgggtgacagagcgagactgtgtctccaaaaaaaaaaaaaaagctcgtcgggccaggtgcggtggctctcacgcctgtaatttcagcactttggaggccgaggtgggcggatcacctgaggtcaggagttccagaccagcttggctaccatggcgaaactccatccctactaaaaatacaaaaattagccaggtgtggcggcacaggcctgtaatcccag

SEQ ID NO: 94647 - DNA, 61052 bp, Homo sapiens
gaccgtgtctctctccggccccaaatactgaatacagagcctggcgagtgccagtcactctccttatatctgtaaaatcaaagtggatgaaagaaaactacttctgagaaaagctgacacgctagtgagtctgatctcaagatcacagccacctggacaagctggcttgctttagacagttcctctcccccaggctctcatcaaggtaagatacaagcttagtttcttcccagccaaaacttaccagctcagtgcccccactccctccgatccctagttcccacactgactggtgttaatccagaccacccacatgcacacttgccttacaggaaggctaagtagaatggggtggcattcgtcttgccccaagccatggataagctacaaggggacaatgcctggtaccaacattatcaattatgtaaaacactgggaaattgcaaaagggtcaggggatgtgtaacctcagaactaaagtgtgaaaaagccactgggagaatgttgtcaaaagggattaaaacaagaccaaagaagtacttttagcttattacagagttcattcacccaggagtcagctctttagccacaagcattgagttgtgcaataaacatctaagtaacatccttcccaatagacggctgggaacagacaaaggggaggtgccctggtatgttgtattttactcataagaggcacagacagtcgttggcactcgagagctggtggaccagtctgtctgtactttcaacgctgtgaagccatagcctgcgcccacgatccagggcactgagatacacttacctccagcctcttgccaaatagtttcacagcagaagggaacttttccttcttgaaccggccccttaaaagtttctagacacctgtgctccaaatgcctgcttgatccttctcaaccggctaaagtcctgcaaggaacacaaaaatgaataagaccgcaggcagctgacatttcaggagagggcagaagctcaaggcccacagtaggagtcaagcaagaggcagaaggtccagtgctcagggcttcaacagccgcatgtcagggaggacggcggacaagccagtcccatcgcaaagctgctgtgcctggctcagcactgacaaagagggaggcgaacaacaggtggggcaggagaaagagccgccgcggagcgcggcatggggccaggagccgaccccggagccaggcagccttcgcccggggaagctccagacagcgcggggacagagcatccctcagacgccggctcgtgggggagggggactatccacgcctccgccccgcctccccggagccccagcggcccctcgcctgtgagctggaccctctccccacctgcgcgcacgccccctacccctgaccccaccctcgccctgtgagtgggcacctgctcacctgggcaagcgccccccactgcgcacaccttcccctggcctcacctgcgcacaccttggccactcacctgcgcacacctcggcccctcacctgcgcccaccttcccctggcctcgcttgcgcgcgctgctccacgccgcctaccctctagccaggggtcgaagtcacccgcagggcaggggcgcccgcccccggatgatgtcagcgattgcctgccaatcggaggcggaccctgcacgcccggcggctccgcgccccgtgattggtcgaggagcctgagctgactccgggcccaccgcgcccgccattcggcagcggccggactcgagattgacggcccaggccccgccctgccgccccaccggcccgcccgggccctagtgggtgggcgcagcctctggcgcttcttcgggatcccagctgaccagctgggggtggggcgtggcggagtggccacgtgggccgcgcggagaacgcgccaggctcatcacctggagcatcgtgcctcagtttccccctcggcaaatggggcttcagcggctcgcgacgcacattgatggagcgtatgtccaggcgccggtgcaccgcaaggagcaaaacagacacagttcttggtcctagggctcacgtcccggggcgaagaggatcctccataaacgatcaggtaaacacatgggtgtcagggaaggctcgccgctgggagaccgccaaagtgacccgagatggagtctgggtggcctgcttattaggggggcacacctgtgcgaggacgggaggggagggagcagcaggactgggcaaagggagaagctgagccacagtgcgagccggacgcacgggccacgttgcgagggcatgacctggggcgaggcagccctggaggagggggcagctgaaggtgtctgctgaccccacacccaacagctcgggtaacaggccttactgtcagagcgatctggttgccacgtctctgtggccctcagagagacatcatgttttcttttttccctgcacctttttgttttgaaaaatgttcagcatacaaacaagttgaacgtaaagtgagcacgcagattcctaggttcagcaggggtgagcagctggccacgtttcatttctctccctctgtgtttatatatgtgtatttttcttttttcctccccactcagcccccaccattagctgcagataccgtgatacccccctcccaaatacttcggtatccaactccttaagaacaagaacctcctatattaccaaaatacaatgaccacatcagttcaatgctgttatctattttccatctccagtttcccgcggttgtcccaataatgccctttacagcccttttgttattgttgttttgttttgctttgttaagacgggggtctctgtcacacaggctggagtgtagtggcacgatcacagctcactgcagccttgaactgctgggctcaagcgattctcttccctcaccctcctgagtagctgggactacaagagcacaccaccacacgctattttttttttggtagagatgggtggggggggggtctcactatgttccccaagctggtctcgaactcctgggctcaagcgatccacccactgtggcctcctacagtgctgggactacaggtgtgaagctctgccctacagcccttttttaaaccccaggatctaatcagggagccacactgtgcattcaggctatgcactttttttggcaggataatatactacatagagcatgttttatcttgttagaaggctgtcaacctgaaataaccaaacgggtcagaatttagcttaaagagagtttatttaagtgtataaagtttgaggacaggctgcctgggaagcacagattttaaagaatggaaatcagtattttgaactgtagatgtttgggatcatttatgtagacaaattttagggaagtttaacagaattttaacatctttttatgcataaagttataatctgaccagctgaggtggtcttttttaggtggaaggtatatttaacattttacactgaagatgtaggagtctggtctaagtacgggataataagagacaatctataataaagatcagtaattaaaaggggagcaggcctggtctgtggtctctcctagtcatttataaaacatgaatgataaagaaaaacagcctataatctaaaagacaaaattacaaacatgctatgtgacccagtttctaggacttaacttccctcttgacataataaatttatttatttttatttatttatttaaagacaggatcttgctctgttgcccaagttgacctaataaatttcaagagtcctaaaattttcttttttaagacaacatatcactgtgctccatgattgatagtggggctccgtggtttctgccagaagtctccatttttccttttgttattaatgagtaattggtgcagtgatactttgagactgtaaatatgctgttcccaaatgacctttcacccagtgaactagcatttaatgaggaatcttgcctgaatcccttatttcttgggacaaagtgttaattttctaattttatcattccctcaacatttattaataaattatttattagcaagcattcttctgtagggatttcctctttgatttattttttatcagtatgccctaatggatttagctgaccgagttatgatccttactgtattgtcctgtatttagctaacgggagccccttcaaattggcttcttttttcatatgacatgtatctaccatcctttgagtacttacttattttctgggacaaccagatgttcaaggatcctccccttctctgcccaggcctggcatcagccattgttggcaggagataatttgagcagatcgtgtggatttcagaagcatgaaaactactgtgaggattaaataagttagcatgtataacattctggtgcttttgtggagtttccaaattgtcatgaacaagcactactttatagacaggaaaaaaagtgattcaaaatgtgaaaacgggtatatgtacataaggtaaaaataaaatcctaagccccccattgaccaaagggaccttctcctgaccaaggggacaccagaaaaacctcaacactgaattcccagacatgatgggatgggaggtcagatgcgcctggtaatagccccctgtttcagagtttggacaccacaactggccggcattcatgttaaaacagagatcgtaagactgacagaacggactctgtggcaataagataccaaattataaacaggacccaaagccatgctaggcgagggtaagtcaggcaacccacacttagagaataaactatattctaagagccacaaggctttctgtttctctattagccaaacacacactagccttgggatagggaatattaaaacaattgcagctccactaggtgccaactaactgactctgtttcaccagccatagcagctgtgattggacaagagactgatttcagtgactttctcctaataagagaccaccgaccagctgaccatgccgaccagctgacccgttaatagagagagatgatgcacctgcatgcctttgtgtcctgaaaagacgttttgccataaaggccctaattgtaagatgtgtaaatgttaagtctccaccccaaagtgaacatgggtcatatattacatgctttgctcaataagagggcatgtgtcaggaccaccttcatgaatattcatagctcctcctgttacctgttgaatatgtatgtttagccaatcccttcagcatagcgctcctgccccaacccctcctccttggacgtgcctgtctctggccttggctggagacagattcccagcctcagacagatggccgccaccttgcaggctacgaccgtttacaagaaataaagccttctctttttccaaatttgtgaattgtgtgtttttaaactaacatgaatgacagaaggaaggatggcctcttcaagcaacgatgatgaggcagttatttatatgggggaaaaatggattctaccgtgggtggactaaagaggaaatgtgaaaaaataaaaagtgagaaaccgctggtagtgaatcggtgcaagcgccctggagaagagacttggcaatatttagtaaagtcaaacagcacgaaccctactactctgcaaagctgctgcaggaactggcggaacgaggccacgaaggaaaccttgccggaaaggaaattgcagcagtgcctgtgtgcgtgcgtctgttggcaaaacgctgctaataacgtcaatgcccatccgctattgaataaacctgctttactgccactatggaataccaaactgcagaaaaataattaaaagaacgtatctcatattacaggggaaaaaatcaagttgcagaagcacattcaagtgcagttcctgtagtttcagaaaaggcaaacagtgcgctacctgagctacttacacacgtggtacaggagtgaaaggggcaggagagggttcccaagaattcagcgccatccgcccagggtggcgggattcccagcacggagaatcgattgctatcgtctgctgtcccgcgggcacgatggagcgctcctaccgtactctccacttttggtgtatttggaacgtttcatgccgtattaaaataaaacatggctaagctggatgtggggtggcggtgtgggataaaatagaggggtgctgcagctgggcggtgagccccctgcacctgtgcacccgaacgggtttgcccgcaagggccggggaggggccggggcctgggacgtgggtggagccggggcgggggcggggcccttcgcggtgccgtgaacgctgaggcaacctcgctgcgcaggcgcggtcgtgagctcctcagacggggcggggcgatccgtaggcagggcctgacgccgcagtcctccttggccggagcctcaacggatgggcggggagggggcggggccgggcaacccggaaggtccggcgtcccagccgcctacctcgctgggaccctggtcttgctgtcccccgctggcctcctgcccaagcgactgcggccaggatgggccggaaggtgaccgtggccacctgcgcactcaaccagtgggccctggacttcgagggcaatttgcaaagaattttaaagagtgagtctggggcggcgggggcaccggtttggggtggcgcacgggcaccgtggctgggcccaggcttgcccgtggcgtgctcacagccttgccctgggaaactctcggccctgggcctgggatcaggtgagataatgggcaatgaccccgccagtggtacgtgctcaggtcctcgtcgggaagtgagtgtttatagttcccggggacgagcgatatacaaggcacggttaagaaaagtctggcggcttaggcgggaggcctggggatggacccgtgttctgatatctctggggtcccgtggttgggactgagctgcccattctcggagatatctaagttgaacagaatggctgcgcactggcggggatggtgtgcagaggccagagattgatggtctctggtccccgtgggccttcctggtgggagaaggcgtcccagaaagggaagtagaaaaagacgcctgtcatcccagcattttgggggggccggagggggtggaagtcacctgaggtcaggagttcaagaccagcctggccaacatggtgaaacaccgtctctactaaaaatacaaaaatcagccgggcgtggtggcctcgaagatagggtgtggttgttgaaaggtcaccatctaattttcgttcatatggacgcaccgtggaggatgaaaagttaaactattacacctgcacctaaatgggcaagcctgcaggtgtagtcaggttgcagcttgtcttgcactggtctgctgactgcaagagcctttgccaggaacaatagaaacagaatgtttcaagagatggcatctaatcagtatgtgccctggattattattatgattattattatttgacatggactgtcactctgttgccctggctggagtgcagtggtgtcatcttggctcactgcagtctctgcctcctgggctcaagcgattctcctgcctcagcctcctgagtagctgggattacaggcgtctgccaccatgcatggccaatttctgtatttttagtagagacaaggtttcaccatggtggccatgctggcctcgaactcctgacctcaagtgatccacctgccttggcctcccaaagtgctgggattccaggcatgagccacygcagccagtggttttttatttttattttttaaatatcaacctgctttcacctcatttgctcagagcaaatctagttgractgaagaaggcttggccaaaactaagtttccactctgccagcctctcctccctaggtgcttgttggaagctgctgcccaagaccagtaagccgatggtgcctgacagtggcaccactgctggatcgtaatcctctaagtcctttttcctctagatggtgttgggcatttccttgttaataaactaccagggtctgacttcttcctcttcctccgcctcctccatggtgctaagggtcagacctgcaagccctccctgtttctcatttcctgcagatataagcaggtatatgcaagtataagcaggtgcaggcgtactcatgtgtatacaggtgtatacaggtgtatgctgccctctgctgccatgctgtcaacaggaagcctgactgcatcccgtytgggaaggcacagagcatttttgtttgttgtttgttttttktttttatcctacctactgcagcaggttgtttcatctgtctttgagtgtataggtgctgaaattgctccattttctttttctctctgtacttacaggtattgaaattgccaaaaacagaggagcaagatacaggcttggaccagagctggaaatatggtgagaacagacacagacaccctggggtcgtcagctagcgataccagcatcagttttccccagctgagaaggcaaggaaggagcagggacagtcctgagagctgtggacacgccacacccrctgttgggcctggttaatgccattgaacacctgagcaagggcaggcccagggaggctgaataagtctagattcccatgttgagtaattaaaagaactgacttttaccagatgaaggccagtttcaaagttgggctgcttctgtgttaccactgcccttttgctgtggtctgaatgtttgcgtccccacaaaattcatatgttgaaacctaacccccagatgatggaattaagagatgaggcctttggcaggtgattgggtcatgagggcatgagagtggagcctgcatgaatgggattagtgctcttacaagagaggcccaaaggagcttgttggccccttctaccatgtgaggacacagagaaggagacaaccagtccttaccagataccaaatctgccagcaccttgatcgtgggcttcccagcctccagaactgtgagcaatacatttctgctgtttattaattacccagtccaaggtgttttgttatagcaggctgaaggaccaagacatattcccaggttttcattccgtgatctcagaatctttccacaagcaagcataggttatcgtttcttatatgcctttttgtaaaaatcaggaaaactgattgcttatttcccttcttgtcccttcaaaaacaaaaacaaaaaygaaaacaaaacaatgagtagccacgttgtaagtctcttgtaagcgatagtcctttctcattttggatgtcagctgccatctgtgctctgctagtttcccgttggtctttaggcctctgacccgttgtgggatctggaagttcctcttcagtctttgtcccctgccttagtgtgtgttcttgcttctggacttagagtaagcaggaactgtcttctcttaggaggttttgtgtgagtccagaggcatctttctctaagtccttccaagtttctttccttcattagattgatttctctccttagaataccaccttcaaatagggctgtttctcccataatatccaagaatgtttactttgttctttaatttgtcttcatttgattgattctttaagaaattcttcacctaagtgccaagggatctagggttctgggctgtctgatatcacaaagcttctatcctctcctggccccgtggccggatcttctcctgggctggactcaaggcctgatcgtctcgtgagcctgacctctcctgggctggtccgggggcctgatcctcatgtcctgtctgctgcttgccctggaggagctgcagtggtgacagcccagtccccctggcctgatgttgcccagatgcttagagtttacgtcttcttttctttcttcgtcctagtctctctctyctataaatgttacatccacctctctctttcctccaaatatggacctgtttcattttaaaagtgggaggatgtctaactaaaggccccygggatggaatatttgcatccagcagggacaggggcccagctgagcaggtctccamgtagcttacaacctgctgagcaggctcctgtgaaatattccaacaacttacagagaggaaaccgaggcaggagaggagggacatcacttcactgagcacaccgcctcttgttcttactggttagaggtccagcacctgatacacagggagggcccagtggccctagagcaggctgactcatggaccagagaccctctcacctagaaaagtcagcrgtttcctttgagctggtgctggaagctttggaaagggraggctaccacccaaatggccccaggaccagctcctgctgctgactcaccgaaggggtgagaggcctctggtcgctggatgccatgcagcgggacgtgtggtgttataacgttatttggtttcacatgtgggccaggacgccaacagggcatgaaaacccaygaaacggatccgttggaggagaaaggacatctcagaactccattccctactgggacatctcctggatgccttttctatctgagaactgggcttttcctcttagcagagccaaggcagagagcaatgctttcccagatactgaaagtcacaattgctggttttggggtttatgcaggtgtgtgcgaggtttgctgggcatttgaagtgtgccttccaggctgatgtgtagtagaaaggagaacttcttgaagagttataagtgttctacagatactctatattttattatgggaaccccaatactaagaaacccagccttcgcatttaatgacaccacagattattgaattaattcctgtggctgccgaaacagatagaaacaaactagaggcttaaagcaacagaaatgtattctctcacagttcaggaagccggaagtccaaaatcaggatggcagcagcgtctggctccctccgaaggctcttggggagggtccctcgtgcctttcccagctcctggtggttccaggtgctccttggcttgtggcctcattgctcccatctctgcctccgtcctcatgttgcctcctgttctccctgtctctcctctcctttctcttacaaggacacttgtcattggatttaggcccccctgcaaaagccagggtgatctcatcttgggatacttaatttagttacatcagcagactcttcttctaaaataaggtcaccttcgcaggtttctaaggtggggtgtggacggacctttttggggttcatcattcagccgactacaagcatctgtagcaagaaacacaggggcagctttgtgggtggtttttctgaatggttattagtgatcttctttgccaaagaatggatttctgtgggtccagctttgtttctttgaggttcttctcttgtagatcagtgtcatttgggccacattaacagttacaaggaaacccaagggcgggcacttcctgatagagagagagtttttgtagtaacttaaaactcagagagaggagcaggggccgtgctcttcgctttcagtacggcacatctggctgcggcagtgggtcttatgctggctgctcattggaatcacctggaaggctttgagaaaacacctgagccccggcccccagacacgttcagactggactggcccacaggccctgcccctccccgctcacmtgagttgtttctggagctcaccttctcactgtctctgcagcggctacggatgttgggatcattattacgagtcggacaccctcttgcactcgtttcaagtcctagcggcccttstggagtctcccgtcactcaggacatcatctgcgacrtggggatgtaagtgccagtgtgagtgtggaagggcaaacctgggacaaaggcaagctcaagggcrtgacccacccaaccggcctccatccagggtgtggaacatccatgtgtccagggatacgaaaggccttatgcttgaaaagtgggttttgttcctatctcagccccgtaagccacctcatttcccctgcaaggagggagctcctgaaagcaggatgtgtcagttcttccagaaagtcctgtgcacacatcagcagactctgcacaaaggggaatgcagcattcaccccaccccgtgcagagagcttgactcacatcacagggagccctggggctcattccatgtccacatgttgccacacggttcccatgtcctaggctgcatatgtgtagctccacaaggaaggcctctgcatgctccatgctggtgtctgtgctgtaccctgcatcgccggtccctatggaggcctctgcacacgctgtgctggtgtctgtgctgtaccctgcatagccggtccctatggaggcctctgcacgctctgtgctggtgtctgtgctgtaccctgcatagctggtccctatggaggcctctgcacacgctgtgctggtgtctgtgctgtaccctgcatagccagtccctgtggaggcctttgtgtgtgctgtgctggtgtctgtgcggtccctgcatagccgcccctatggaggcctctgcatgagctgtgctgtgccctgcatagctggtccctatggaggcctctgtgtgcgctgtgctggcgtctgtgctgtccctgcatagccggtcccctatggaggcctctgctcacgctgtgctggtgtctgtgctgtccctgcttagccacccctatggaggcctctgtgtgtgctgtgctggtgtctgtgctgtccctgcatagccggtcccctatggaggcctctgcacgtgctgtgctggtatctgagccctgctttgaatagccggctccctatggaggatgctgtgctggagtctgtgctgcgcactctgcatagccgtcccctatggaggcctctgcacatgttctgctggtgtctgctgcgctctgcattgccatcccctgtcactgaacctcgcatcgagtcctttacgtctccttcagccccgcctcatccggcatggacgtggcaccttggctcgcttcttccttggcatctgcctggcacatattctcctgccactcgcgtgcgaccctcaccgtgacatttgtggactggggcctcttctaagcagcacatggatgggaattttagtgccctgttcacacggatgatgctaattggtcctgtggactctcttagtttccttttgccgctctgatgaatttccatggacacaaaacacacaagcaacaccagtcttttatctaatggttctgaaggtcggaggtcaaggggtcaggggtcagcagcaagcctggttccttccggagacactccaggaggatctgcgtccctgccttctctagcttccctggcctgtggcccctcccagctgtgatgtcaccccgacccccacgtctgttgtcgcagtcctcctctgaccctccctyttatggggacccttgctggctggcccagattgtccagaatcatctcccatctcaaggcctgtcacctcatcacccctgcagcgcctcaggtaacataacacagtcacaggctccagcagttaggatggggacatctttgaggggctgagagtcagacgaccacaaggacttactctagtcacttcaccaagttttctattcattaggttttcttttttttgtttgtttttgtttttgtttgtttgagacagattctcactctgttgtccrggctggagtgccatggtgccatcctggctcactgcagcctcgacctcctgggcttgagtgatccgtccatctcagcctcctgagtacccgggactacaggtgcacaccagtacacctggctaattttattttttatttttcatagagacagggtctcgctatgttgcccaggctggttctttttgggttttgccttttgttagttcatttttgctcaaacttttcccctgctgactttgaatttatcatcctcttttcatttttctactttttacacttaaatttgtaaccatcatatttgaagtattttttcttttgaaatctagcatttttctggattggaggctccattgaacaaaacaagagttttatcataatgtcattgataacttccatcctgcatcgtttcttcaaacggtcctcaaggaagagggtgctgagttgggtccccgccctctgtggttggtggtgcaccatccttagttctgctccacaagggtttgcctttataagcaaaataaagaaacagagtggtgaatagttttttaaaaacgactgtcttatttatttgctttgctcacttactgagttgaacttttttttgtttgttggtgatttataacactcttcaatagttacctggttttttgcctacaactgtttttgtctcttttaatttgagtcctttatatgcgaaacatgtcagtccattcccacgtaaggtaaaaatccttttcctggtgcgttgttcggtgtgtgactttgttttatgtgttcagtggtaaaatggtcacgtagtgaaagcgccgccctgatctgctttagtttgtttctgagtttgttctagtggcttactccacttagagatcagatattcacggagggcccgtattttatttaaaacatctatttctctcacactctgggcacactttgtctaagtgagaacaagtttgtgttcgtcaggcatcttccatggcaagaacaggagcaagagagagaggggcgaggtgctacacacttttttatttatttttatttatttctttttgagacagagtctcactctgtcgcacaggctggagtgcagcggtgcgatctcggctcactgcaacctctgccacccgggttcaagcgattctcctgcctcagcctcccaagtagctgggactacaggcatgcaccaccacacccagctaatttttgtatttttagtagagatggggtttcatcatattggtcaagctggtcttgaactcctgaccttgtgatccgcctgcctcagcctcccaaagtgctgggattacaggcatgagccacagcacccagtcgctacacactattaaaacgaccagatctcatgagaacccactcactcactgtcaggagaacagcacggaggggacagtgccaacccattcataagaactccgcccccaccaggccccacctccaatgctggggattacagtaggacatgagatttggtggggacctgaatccagaacacatcggagaggaatagaagccatgatggagtgagtcgcttgtggtggccgcagccaggaccggggcaggcagtggtgcccctgcatgcatcttgccctttcatccccatttttgggaggaagaatcaaggctgatgtcaaccagaaataaaattctaaggccctcccaaccttttgaatgaaccgcttctctcagaggggccctccaaggttaacctgaaagacsggttcaggccatgactgggagtggggggtgatcgggggtcggacaggcctcatttaccctcctcccttttggaaaagcygaccagcatgagcatcaacacagaccttaagtctcataagaaacatttacagtctgttctctctgaagcctgctacttggaggtttcatttacatcataaaactttggtctccacaacccgctatcataacccagacattcctttctattgataataactctttcaaccaattgccagtcagaactgtttaaatccacctatggcctggaagcccgtccctggccccctcgagttggtcctgcctttccagttcgagcagtgcccatcttgtatgtattgagtgacgtcttctgtctccctgaaatgtgtacaagcaggctgtgccctgaccaccgcaggcacgtgtagttaggaccccctcgggctgtgtcaggagtgcatccttcacctgggcaaaataaatgttctaaatggactgagacctgtctcagatacttttgggttcacaccggttacttagccagtggcaaggctggaattggaactccacascatccacatttggtttttcttcccctgaaacacttttgctgtcgggtcacacctctggcaggcgcctgtgcttttcttcgacactgtgtcctctcagtgcccctatgagggtcatcttccccttgtgctgccctgatctggcccaaacctcctgtcgggtcactctggtccccactcgagtgcccccagccaggccgccctctcctgctatggtccccttatctgcagggggagatgatagggtgttggcgaggtgatgggagcgtgaagccaagacccagtcccgagaaagggccagcccggagcagcaaatggaggggttccacctgtcccaggtggtgggtggaaatgagctcagggcggacaggtgctgaaaagtggatgcctcaggttagcataaggcaatttggaaggggaaggggaggaggcaacagaggctggaacattccaggaggagagggaagaaccctgtggtggaatgaatttgcccttcattgagaagaagctcctctaggcttagagtcggtgctgcctgggtggcagaaccatctcggctccttttagctttgatttgagggtgccacagaagagccttgcagttctccgaagggatcggaggaagcttcgtagtaaagtaaaatgcatgattccagagctgcagccgctgcctccatgtgctctgtgtttcataaccgggcagacacrcatgtacctcccctctctcctgcaggcctgtaatgcaccgaaacgtccgctacaactgcagagtgatattcctcaacaggtaggccycctgcccccacccygggagggtgactggggcctctccctggctctcagcygagggctgccaggacccgtgctggtgccctggggacccgttgctgggaggctgcttctggaagtgcccgggcttagtgagggccgatgcaccaggcaggtgatccgggtgcctttgcttttctgggtctcagccaccaccgagacaggcatcatcaggtatcagaaggagagagacgcagagggtgggggtgtggggacacaggtccttgtggcctggaagccagtccaggtgagcaagttcccttggagcgcctggtcaccagctgctggggaggcgcacaccttytggggcttagctgcttcatcgttgacggtcacgaatggatgcagccatggggacccgagtcatagaaagcggaagcccagagaaggagagagatttgctcggggccccattctcaagctgactctgcatggcatcacctcgtcacttggtggcactgaccaccgccagtggcacgttcatctcaggagcccggtgtgcacagccctgttcccctgtctgcaggaagatcctgctcatcagacccaagatggccttggccaatgaaggcaactaccgcgagctgcgctggttcaccccgtggtcgaggagtcggtgagtcgggtgcctgaccactcctgggatgtgcgttaagcacctccgctgtgtgtagccttgggtcctgatcatgggagtgttaccggtggagggtgtycaggtttttgacattttgaacaaagaatgggacaaaaagcacaaagaaagccaaaaaagaatraagcaaccaaaggagagagtgattgaaaatgaaagccccctccacagggtgggagcagccccggcaggggctcagggcgcggttacacaatgtcccggggtttaaatatcctctagaggcttcccatcggttacttggtgtgagccccatgtaaatgaagaggctgaagtggagttacaaagttatttacttggtgtacacactatgcaaataaaaagggtgtttcctgtctgaagtagttacaaagttatttacttggtcttagaaagctggggttttgggctgggcacggtggctcacgcctgtaatcccagcactttgggaggccgaggtgggcggatcacgatgtcaggagatcgagaccatcctggctaacacggtgaaaccccatctctactaaaaatacaaaaaattagctgggcgtggtggtgggcacctgtagtcccagctactcgggaggctgaggcaggagaatggcatgaacccaggaggcaagagcttgcagtgagccgagattgcgccactgcactccagcctgagcaacagagcgagactctgtctcaaaaaaaaaaaaaaaaaaaaaaaaaagagcggggtttttctgtttgatttagttctaggaagtgcttaggttccctgcccccagaccctattctacctcagcagtgtcacagatatcgactagctggggccaatggtgcaggcagtaaaggaatttaccaagacagttgtaggtaaagagaggcagatttattagagaaggtatgaaagtatgttacaatatcgcaayaggcagcacagcagagaaggggctgtctgcagagaggcaggggctggagggaagttttatagcattgtgctggagggggctacattggggatgaggtagaactgcgggggccactgcggaaggaggtcattgtgcctgtgtaggacattgtgccctcagaacaactgttcattgttctccacatctggggccccatactcattgcttccttatctgatcaggcctctgcaagtagaagatgcacagaaacatggactagggtctccatcccctggtgccagtcccttatatgcctgatttgatgctgctgattaaattgtagccaygttcagcgcagatcacatggaactctcagtcatcaatcagggatatcagtcatgttaggtgaagtgccacttccatcttgaatgatactgaatttccatcttcaccyggttgacatttgggtcattctttgtcatggggcgtcggccatgtgcatcctcaggcatttactggcatagctggtctccccacagatgctcccagttgtgacaaccaaaaatgtccccagacattaccagatgtcccctggggggtaaaatgccccggttgagaaattctactctccatttttattacagttatttctgttttttattgttgttattgtaaatggactctttaatattatatttttaagtggttaattttttatataggaaaacttgatttttatgttgcttttgtaattgactacctcattaaattctcctrttgtgtctgttggttagtctgttgatttttgtagtttttcttttaagttgaacttatataatatacaatgaattttccttttcctttccagtatttgcacctcttggttcattttcttaacttttgttggccagcatttctagaacaatgttctagatcatttctggagcaaaattctttgctaatgggcaatttcgtctttttcctgactttccttggaaagctcttcatgtttctgcatttgatttggggcttatatctatctctagctagtcttacttcaggtttttaaaaattgagaatggatgtygagtttatcccatgtctttttagcatatgttgaggtgaagataaagtaaatctttgctttctaatgtctccagaaaaaaaaagcgccatcttttgatctcctaggctgagcacctacactcagccacttggactttcacttaacatgcccccatcctcagcctctagacctcaagaccacccctttccctgtcccctgtctccyrggcctagtgttctggtgcccagggtctgtctggtgcactctggttcccagtgggatgatgtgctgggcctgggaggtggtccaggtatcgtttgcttctggctctgcctcaccccgccctctagagcctggtgctgccagacacgggctgcaagatctccgtgggyggatggctttgcttctcatggccactctcttctgcaggctccaaggctgtaatttcactctctctgccagcagaggtggagagatgtctgttgctgctccctcgcggttcactttctgtcttgcaggtggaatcgttgcccgctcttgtctgccactcactcctttgctgctttgccatttctgactccagggcagttccagaaccggaatgaccctcataactgaagccattagtatgtyggatacaatatgtatgcatttatgtctcattttcaaatgtgcaccactgagctggcaggaaagtacagaatacattgagcctaaaaacagtgaaactggagaccctgggaccctgggcgcaaagctggcttttgccccaagggtttcctacgcctggagaccttgagttttattgttgataacttcatggaactggaggtgggggggtgggcaggagatccaataggagacacctctgaatgctgtagctacagatggctcacactaaaaccgtgactgagacataagtccactgcacagagagggaaggctgaacacatgcctccctcaatctggtgcttggtggagggggagagatgttgcctagaaattgacagcctttgtgctggaaacctccctacctgtgtagtataagactcaggagaataagttaattccatgtggacccaagatgagttcaggaagtgtccagtctccaggcaatagaccttccagaagttactgtagcacccgcaggcgctgggcacaggcaaacagacgtctctctggagaaattcaccttcaatccaggctgctccgaatttctagacgtgacatttaaggaaaatgagaagctcagagtccagtcataaaacatacaaggaaataaggcacaatgagtcagaaccagcaaaaaaaatacagtagacgcagatgtgaaagctcaacacagaatagaagataagtgttcctaatacactgaagtaaattgatgagaagctcaaaaggtaagaagcagccaatcagaattagaaaaagagccaaataataatgtgaatgaataacaagtaagttaaacatagttgaatagagaggtatggaactgaaagatagacctctccctgcaattatccagaatttaagccttaaagaaaatctgatgaaaacctaagagacattaagaaacatgagaaaagggtgaaagtggataacaagggtggaattcttgtctcagaaggagataatggaggttatagagaagaggcggtatttgaaagaaaatggaaacatccataagatgtttaaaagatgctgttctcagatacactaactgcaacagatctcaacaggataaacaaatagaaattcacatctagaaacattcttgtgaaaccgcagaacactaaagacacagagaaattctcaaaagtagccaaaagggaaaaagacaaattgcccrcagagattcagcagctagagcaactcctgcttcgtagtggtgaagcctggagccaggagacggtggctggaaaaaatccgaggagagagtcaccggcagccaggagtgttagaatcagtaaatgcatcctttaagaacaaggacaaaatcaagacattttcacacaagcaaaaacagttttttatcattaaaagactcattagtggaaattctgaacatgtacgttaggcagaaggaaaatcatcctagcagaagcctcgaaatttcaaaaggattggtgaaaaaggatattgataaatttgtggatacgtgtcaacaaatgggactgtatgaaacataatgtctagtgtgtagtaraaagtaggccagccctaaatcactgcatagctgtgcgtgtaaattagggcaatgctctgtaggagggtaaagataaagatactgatcaatttttgactttagttgagagacacagaaaatttctagggtagccactaaaagaaaagatatagaacatatgattgtcaaaatagcaggcagaagaaaagaagactaaaaaggaaaaaatgaaataattccaaataaagcataaatggaagtgagttctttaaaagtccagtagaaaaagtaggactcagagatagcacataagacagaataaatctgtcagtagtcactacaaataaaaatggatacaataatttgattaaaagacagaggtcattattctggattaaatgaaaatccaggaataggctgaaaccatattgtaattaacaatacattttggcaagtttgctggatgataaaaccaaccaaaagccaggttcatttcatttaccagcaacattcagtcagaacatgtaactttaagaaagataccatttatgacagcaggaaaagtgcttatggctaactataaccagagatgtgtaagccctgtatgggaaaaaatgataaaattttatgggagggcattattgactactgagctaaatggagattgcctgtgtgtgtgaaaaggaaggcacagtgtgaaaagcattcatctcccctaagttgatctgtggattcagtgtagtttccataagaatctgaacaggaaattcaataaactggctctaatatttccatggaagagcaaaaggccacaaatagctaagatactcatgaagaccaaacgaaaggccaggtgtggtggctcatgcctgtaatcccagcactttgggaggccaaagtggtcagaagttcaggattcgagaccagctcagaagttcgagaccagcctgggcaacgtggtgaaaccccctctctaccaaagaaaatacaaaaatcagctgggcgttgtggtgtgcacctgtggtcctagctgccaggaccagcttggttgtggagaccctaatcccgcagcactagaggaattaaagacacacacagagaaatgtagagtgtggagtgggaatcagggggctgacaaccttcagagctgagagccatgaacagagttttacccacatatttattgacagcaagccagtgataagcattgtttctttagattatagattaaaacgggaaacaaagggatgggctctggctagttatctgcagcaggaacatgtccttaaggcacagatcactcatgctattgtttgtggttcaggaacgccttaagcggttttccgccctgggtgggccaggtgtttgttgccctcattctgggaagccaacaaccttcagcatgggcgtcatagccatcacgagcatgtcacagtgctgcagagattttgtttatagatctgggggcctgttcccaacaccagctacctgggatgctgaagtgggaggatcacttgagcccatgaggttgagcctgcagcaaactgtgattgtgccactactctctagcccagaagacagaacaagagcctgtctcagaaaaaaaaaaaaaaaaaagacgtgtgttagtccgttttcatgctgctgataaagacatacccaagactgggtaatttgtaaagaaaaagaactttaataaactcacagttccrtgtggctggggaggcctcacaatcacggcagaaggcgaaagccatgtcttacatagcggcagacaagagagaatgagagccaagcaaaaagggaaacccattgtaaaagcatcaaatctcctaaggcttactgccatgagaacagtatgggggaacctgccccatgattcaattatctcccaccgggtccctcccacaacatgtgggaattacaggagctatgattcaagatgagatttgggtggggacacagccagaccatatcagcgcacctgggtgcatgagtgatctgtgccttaaggacatgttcctgtgttgaagtacaaagataggcaagatttgatgcggggagcacttccaaggagagagcagcgcacgctgggggctyggaggtccaggygatgctctgctccttcacctgggtactgtgtgcactgggcttattttaatatcctttaattacacatgtgtgccttggtactcttttgcataatatattttgcaataaaattaatccataaaggaagtctgtggccaaacagattttagcatttctgcaggagccagcttttcctgcttaggtgccgtgggatgtctctattactcctgaggttcagtagctccagcaaatggcttggggattctccttattttttatgatacctgtaaggttttttgactccacattcaggtcttcttatttcaggaaagtttacctattttctgcttccaaaggctttcgttcttttgcttctgttctgttcttcaggaacctcgatggctggcaagtgacatgtctgtgtctgcctgccttatctttcatcttctttctaaccatcactgtcttcgtttatttgtattttttttctggcagtttcattcccctgaatttgtcttctctgcagtgctcttcacagggctctatcctgtgcyttgttttcttatctgcaagtattttaagacttcaaattcttttcttagttgtaaacttatctcctgtcatttatttgtgcttttgttgagaaattttatcagttgatgttgtctttaggatttcagagcataagtgtggggctcctgttccttcttccccrttcgtttcatgaacgcctcggtgtcaggtgtcacactgggccctctgggatggtattcctttcatccccgtggaagaggtggcaggaaggtgaggctggagcccaccagaagcaactgtacattttggttcacttagagaaagctgaggtttctaatcctctgggagctgtgccgaatgatgacaagaaatggtcatgttcagcatgcccctgctttagtaaagagtacttggcaggctcaaggagccattccaggttccaggtcctcttaggaaaacataactaaggcctggtccttgcctgcagagagccatcctcaaggtgtgcgctggctgtggagcacagctgcagtgaggagcaaggccgggtacatgcctgtcccgctgggtctttgttccggtgtccagggygtctttgcatgagtcgagggaaaggtgcagatgaagggagagatgtttggacggttcctgcatttaaaatgcatttcggtgcagcagcatcrccgtcaacaggctacagagggtgaatggagtgctcaatatgggatggcgaggcagcctgcagttctgtaggatatcttcmtgtccccgttccctacgtgaatgagggggaaagacatcattgactcagtttctcaacctttaacatttcttaagtagagagaactactaaaaccatgcccagaaggctcctgggaattctaagaaagcaaaaaggaaacggagttccttgcagatctgagtggtgcatctcgtaacagcctattggaagtcaaatgcgtgaactgtctgttttgaagattccgcctcttggtggagcttcttgggacaccttgcactaaagttggtattaaaccctcctcctgatttctcgaattgagagcatcattttattccagggatgatactggtttgtcattgtgtttcgggttaatgccacacgatttttctgattcagtaacagcgatcaggaattccacctggatttctccatgaggcaacgtggccagttctcagcaaatcccctgtgacacatctctcagtaaagatgaacatgagcgtgtggggaaactgaggcagcccgaagctcrgagagcccagcccaccaccatgtcacatagtctcctcaagccaccttcatactcttttctttttacctgaatgcgattgtttattgcattggggggaacgcttggcagttcctttgccagttcatcagttcggagggttcagtttgagttttgtttaaatgtagccgccattcctcatttgtcctgagatgctcatcctcagctyctyggtgttttcctctccaggcacacagaggagtactttctgcctcggatgatacaggacctgacaaagcaggtgagtccctgggtgtggagcccgtttttcagtcggttgtcgctgttctcggccaacagtggaccaggtggggcgggaacgctttgggatccaggtaayggaaggcaccacagtgctcacaggtctgaaacagacaaaggaggmaggttcctatagtgaggggggctgcgtggccagacagcagccagggyggctcctccttgccttggggctgcttttcctcccttcccccrctcacactggcttcctcctcttcatttcctccttgtggcagaagacagccttctccatccccagggrctatgttctgacatttaagtgttatctagaccaacagcaaaatgccctactctcaattttgaattctaagggaaggcaccctggtgtcccctctcagccactgccttgtggctgggagtgggggcctagcttcatcagcacagggcagcagctgcttcagtgtgatcasaggacagggtcgcttcagaagctgctggccccaattggcagccccatcgatgtccgtgacattctgccccttggctgctcagagtacaggcgtccccttcttccacacataggctcctaagggcgtctctgcctggcaccacccggtgtcccatgcgcagccgcagggcacccamctcttcggaatgtgcgagagcccagagccaactccagctcttgtggctgcaggatgtccgtggccctaggtagtgcgtggcccagacagggcrtggctagtgaatctcatgcactcttctcttccgactgcaggaaaccgtacccttcggagatgcggtgctggtgacatgggacacctgcattggaagtgagatctgtgaggagctctggacaccccacaggtcagccccatgcccctgtgctgtctgatcgcccacctcatatgggccagctgggaggacctgggactgcagacgtcctggggccrtggccgtggccgtggccgtgggctgggagctgccgtgggagagtgcaaggggctgccagggaggctggtttggaggagtctggtggcctgttctcttcacctgcctctgcctgcagcccgcacatcgacatgggcctggatggcgtggagatcatcaccaacgcctcgggcagccaccacgtgctgcgcaaagccaacaccagggtggatctcgtgactatggtcaccagcaaggtaggggctgggccagggagcgtgcgccacagggcagacactgtatctcaagaactcctgcatcctcagtgcccatcgcagggctgggcccacacacaatggatgttccaggctagtaattatggcctggactcaacaagtgtgccctgctgccctccagggcttcgccggcacagcccatctcacccacgcagccaccctatgaagcaaccctgtcaccctctctgccatgaccaggaaccggaacgtgctccttgttcgttggcatcatggtgaggcgtagggaacacccgtacgtttgctgctcctgctgttgggcagtgagacgtgcgaggggcagtgctggttcatccttcacggggcagatgtgggtctagctgagccgcgtttgagtcttggcttcatcatgcagagctttctttggcttgtctgaacctcatcatgcctgagggaggtgatggggyctgccttgtagggttgttgtgaaggaaaaacaaatgttttgtgtagagcctggcacctagcaaggcggggctcgccgcagcttcacaggtctgtgcttccccacacatatgcgttatctctgcggtggtgggaccactcaggatgacctagcgggactcgrcrgaggttcctgtacttgggcaggtggcaggtgagggtggtggacacagctgaccactccgctatggggtcctcctttttcagaacggtgggatttacttgctggccaaccagaagggttgygacggggaccgcctgtactacgacggctgtgccatgatygccatgaacggaagcgtctttgctcaaggatcccagttttctctggatgacgtggtaatgagcrggcctggacatgcctgggggagggttctctgtgcagagaccgagctcctggctctcccctgtaagccgggtgcttagtgagggcccctgtggagaagcccccgggggtcccgcctgctcctggctctcccctgtaagccgggcgcttagtgagggcccctgtggagaagcccccgggggtcccgcctgctcctggctctcccctgtaagccgggtgcttagtgagggcccctgtggagaagcccccaggggtcccgcctgctctgatggcctcaaatttacctggttggtgaggggggacctcccgccctcgggtctggagacagctgaaccccgacacacagcacatagtagtggacggatgaggttgagggcagcttacgagtcctgcgttcccacagtgcgggaggagggctccgtgccacgcagggccaggtgggagtgtgctcaggaacagaggggacggcccccgctgtgggaggcgggctctgtggtgatgagaggatgggtgccgcctggcccctgcgggtgggtgtcgttggtttgtttgaattccgagggctggcagggaaccaaagccactcctttgaaattagcaggctccatggcccctgagacaggtccagggatcccatgtatggtgaggccgttcaaggccctgtctgtcttccttgggtgttgaggccacatatactcatctgaggccttatgccacgctgcccctgagtcctgggaagcagaagtggagaccccaggacactctggtcagggaggctttgttctgtggggatctctgagcacacagcggccagctgcgtgagggagggccctgggggagctgtgagttacaggtcggaagcgccattgctatcccgaagcgacacagatatgtggrtgctccgaggaaggagatgacagagaacaaagctaagaaccctgcttggcacattcctcaccagcaactgagctgccgcttggaatggggttcaggaccttgttggggccccagattcctttgggaagctgatgaaagctctgcacattctgcggcyaaagatgcgcattagcacagggcaaggcttcccaggtaatcgttatcgccatggaggcaaacttcctccacagagaagggaccacagttggaaagtccttggggaggtttrggccactctccctttcggttgtttgtttgtttttgagatggagtcttgctctgtcacccaggctggagtgcagtggcgcaatcttggctcgctgcaacctccgccccatgttaaagcaattctgcctcagcctcccaagtagctgggactacagacccatgctgccatgcccagctaatttttttgtatttacttagtagagacagggtttcactgtgttgccccggctggtcgcaaactcctgagctcaggcaatccacgcacctcagcctcccaaagtgctgggattacaggkgtgagccaccgcacccggcctstctttctgtttttgaagcaaacaagaaaaaatgggctattattgccacaaatggaaacaaatcccaagtgcacaaatacaacaaaaagtaacttttagttctgccccaagccggcgtgggtgggagcgtctccactctcgggctcagaccacacgcgggtccacagcactgcctcccacacacagcattgcctgactcgtctttggacccgacggccttccactctgctcttkttgggaatgggcattaaagcagcggattcaccgaggcaggcggtagcaccggaggcgagttctgcagctggctttgcaggagcagggcgagcttgtgtcctggcgtcgccgactctgcgaggctgtctgagcagttcattgctttgctcccgctgcgttcccatcctcatgattctgtctggtgctttctgcacagcataggtgtggtcagcacggaggcggttacaaaaccaaaccagtttcatagtggaccaagtgaacttcaccctgaacaagaattccacggtcttttcaggggtttcttgcacgggggcaggcaagggtgtggcygtctcgactccaggccctgctttccacatgacagtgtccccagaggcctccttgygcttcatcattaaccgcgacagagctggaagggctttgaagagaaggattaagttcctgctgatgggaagtgtggtcctctccccgttcacgtcagagccacaggcacattggtggtcgtgttgattggcaggtgtgttggcaatcaatcacctgccccaggacccccgcaggttcccggccccacatcaagccaccaaatcggagtcctcgggggtctgtatatttartgagcaccaggcagttgtttcgtgcattagaatccgggagccgttgccttacacgtctctagagttcctgatgttgcctgagagctccgtcgtaggctgtggccacaggcctgctgtattcagagtggccgcgctgtcctcaggctcgggccactgccctccaccaggtcctccgtggtgcacctgaaatggtcaacagaagtcttgtgacacgtggaatcatttcagagtcaccccttctgcctcctgctcaagcaacagacctgccgatcacccccgtcgggcccgcgtttctcwgggtcttcctaatcccctgggctttccggcttgtcgtgtgcctggagtcaggccgcygtgcggcaggctgttaacctagcctcrgggagagtgggatggagccaccttctcatggaacgatcctcgccttccctcatctccattgttttatggcttcacacggaccgtggctttctgcatggaagcttggtggccagggtgctgtcactttgggaagcagccagagaaccacaggatgcgtgaatcggtctccttgtcttcatgggcatctccggccaggtatggccccctgttacrgcggtaggagcaaggggcgcgcaaggtggccacggccatcctgtgaaccgccgcagtggtgcaggtgctgttcccgctgtcccacactcgtgtttagcaaggcaacactcaggaacacaatttgataaagatattttttcatgaaggaataacccctatgagttaaaacctcatttctgcatataccgcaattggcagaacccctaccatagccgggttcaaaggcagggcagtgtcacctcctgtgacacaggcagcacgtccaggccaagaccctggtgtggatgccggggctgcggctccgcctctgccctcccccagctccatcctcctttgtgttggcctcagtctcaggttgcttctccagctccgccctcctctgtgttggcctgtctcagattgcctctcctcgtgggcatgggatgtttgccccagctccagccatcccatcttcacacagccacatgcagaggcagcaaagtggccttggctccttgcgtgtctttttgatgagaggggtgttcccagaagtcgctggcagaggcttactgacactggggtgtcttactgacaggggtgtgtcttactgacatgggggtgtcttactgacatgggggtgtcttactgacaggggtgtcttactgacaggggtgtgtcttactgacggggtgtgtcttattgacagggtggtgtcttgtgctgtgattagtgggtcactggcaagtgtctgaatgaagtggaggttccggtggcaacagtgacggggaagggctatgggtccgcctcaatgtcatctgccccatccctgggccyccaggaatccagggtctcagcccctgctttagaaggtgtgacaacacctttgacagtggccaaattacacgtgggagttgaacaaacgggaaatcacgggttctctttgaaatttccttcyccaggaagtcctgacggccacgctggatctggaggacgtccggagctacagggcggagatttcatctcgaaacctggcrgtgagtgctccagtagacacctgtgtgggatgctcatcaaagacgtggaaagtggccccattcgtgcgggcctggtggaggccgtgagggtgcagtgcctgaaaagtctgacagggaagttccggacttcccgagcgtggaaagrggctggtgccgcagacagaacctgcttccatctgttccccgtcatcctctgcttgggccaggccctgagctggggtgagctggggacaggcaggcagagaggctgacgagacagtcagcgtgctaggggctgccacacaaggaagacccaagcagccttggagcccaggaaggcctcaaggtgaggggtggcaagcgtggtaggaacaggcacacagtgtgcagccgaggctggtccccacttcggcagttggaggcaaggtccaaggcacaagtgagcctgtgtctgagaccctgggatgcaagtaacgcccctcctgcagcccgaggtcctgctgctggtaacctggagctctgcgtttctgcaggacatcgtcacaaataggatgtccaactgagcagctgtcatgagacagtgatttttgcaaacattgaagaagtgtgatgctcataacagagcggactcttctgctgttgattgattgagacagggtctcattccrtcgcccaggcttgagtgcagtggtaccatcacagctcaccgcagcctggacctctggggctcaagtgatcctcccacctcagcctcctgagtagctgagacaacagacacacaccaccatgcccaactaatttttgattttttttaatttttttttttttttagagacagagtctcactatgttgcctaggatggtcttgaactcctgggctaaagcaatcctcttgcctcggcctcccaaagtgttggaattacaggcgtgaactaccgtgcccagcctttttttcatagcagttttattaagttgtatttgccataccacccaatgtatccatttaagcacctgattcagtggtttttcatgtactcatggagttatgcagccacaatcttagcgcattttcattaccccaaaaagaaactgtacccattatgcaccccgttcccctcctccggtcctggcaaccacragtctactgtctgtcttcatggatttgcctattctcgacgtttcattgggatgaaatcacacagtgtatggcttccacactttactgtgctgttgtcaaggtttatctatgtgttgggtgcagccaccccttggtatccacagggattggacccaggagcctgcaccgatcccctgcagggatgcctgtgtcccacagtgccccctgcaaaactcactgatatgaagagtcggccctctgtatccatgggcttcagatccygtgattactgtatcttctgtctgtgtgcagttgaatctgcgggtgtagaacccacagacacagggagtggctgtagcttatccctttgtatggtcagagagtgttccgtagcggggatggacacgtgttcattcactcttccactgatgggcatcgggaatgtttccactttctgtctatcattaacaattctgctacaaacatacatgtacttctgttggaggggacacatgttttcatttctcttgggtgtgtctatccaggdgtggaattggctgggtcttatggtaactctgttaactgttttttgctttttggttttttgtttgttttttgagacggagtttcacccttgctgtgaactaccataggctggagtacaatggcgcaatcccagctcagcacaacctctgcctcgtagattcaagtgagtctccggtctcagcctccctagtagctgggattacaggcttccaccaccatgcccggctaatttttgtaattttagtagagacagggtttcatcatattggtctggctggtctcgaactcctgacctcaggtgatccacctgcctcagcctcccaaagtgctgggattacaggtgtgagccaccgtgcctggctctgtttagcctttgaggagctgccagagcgtttgccacacagctgcaccatggtagtttccaggcagccaggtttgagaatcccggtttctcacccctcaccagcacctgttgccattggtcgctttgcttctcgccatcctcgtgggagtgagggtggcctcactgtggttttgacatgcgtttctgtggctgatggagtcctgcttgtctgtcggtcctggggacccagagggtttccgtgaagctgggagtcattctgtcttgaatctccattgccaggccagcagggcgagccyctaccccagagtgaaggtggactttgccctctcgtgccacgaggacttgctggcacccatctctgagcccatcgagtggaaataccacagccctgaggaggagataaggtgtgtggcccctgacccctgggagggacctggcgtctgtgtggccacgcccctggggtggggactcctggaggtcacgcagtgggttttcagaacctgcctgggtggggacttgcagaaggcaactgtgcmtcccctgggttgagggcgtggatgctagagccagaacccctgggtgtgacccccagccctgctgcttccccgtgctgtgaccttgggccccaaggtgctgtccgtccattctgtggttcagtgtccccattttaaaatgaggacgatgataatacccacgtcctgggkctgtcttcagaatcacatgtgtcccttctcacgaggtgcctaaagcagagacgggcgtcctgagagcccagcgttgactctggcactgcagcctcctggggcctgcttgggtgggttgttgggtgctgtgggcaggggccaccgcctccgggctccatgttctgattgccctgcagccttggacctgcctgctggctctgggattttttaagacgaagtcaacaggtaagacttccagtttctagtgagcccactttgcttgttctgctggttggtctggttttattctggggcagggtagggatttttttttttttttttagtgcaaacaacaaaaagcatttcatcactctgcctccatggggagcttagtctgygctagccagaggcaaggtgggcacagtggctggtgggtcagctccacctttggaggctcagcggaacccagcccatcagcattcagggtcacgctcaccatcttgccagcattgtaatcatgcgtatctgcagttcgtcggtggagtcagcctctgacacgccccgcagtgaagtgtcttttttccctctgaaaaatycattcatcctgccacrtgcgggtatttgtcctgaccccatggaaagtgctracacccacgtgcatttctgtggacgcctccttgaggtctatgggtggagcttggctgatccatgggcatgctgcttctccgaggctctgctcacgctgtctgattggtccattccaggcagggtttttgctgcccttgagtggcggggtggacagcgcagccaccgcctgcctcatctactccatgtgctgccaggtctgcgaggccgtgaggagtggaagtaggtgacatctgttggcttgagggaggctccagggtccagcccttgggctgcctgagttagsgacctaggagggggcagaggaaacaccygtgccatggacatcggggtgaagggggctttgtggccacgcacaaatgtcacagyrtcacatcccagtcctgcagctaaggcagcaaggccatcagtagcttcctggggcttcgggcccatgtggctgagtctccagagctgtacctgcctgctctgtgcacggtgtggcctggtggggagaacacaggcgtcggaggttcacatcctcccccatgtgatatagtatcagacatcaccttagcatatgcagcagaacagcggtgatgatgcccgatggatggggctgtgggccatagcctgggctggcgctgcacaggcacctgggggtgtagaccggggtgcagccgtacgggcacctgagggctgtagaccggggtgcagccgcacaggcacctgggggtgtagaccggggtggagccgcatgggcgcctgggggccgtagactggggtgcagctgcatgggcacctgggggtgtagaccggggtggagtcacacgggcacctgggggtgtagaccggggtggagccgcacaggcacctgggggtgtagacyggggtggagccgcacaggcacctgggggtgtagaccggggtggagccgcacaggcacctgggggtgtagaccggggtggagccgcatgggcacctgggggtgtagaccggggtggaactatgtaaacatcccacacactcaggtgacttccacccattctgtcctggtggttttcagatgaggaagtgctggctgatgtccgcaccatcgtgaaccagatcagctacaccccccaggatccccgagacctctgtggacgcatactgaccacctgctacatggccagcaagaactcctcccaggagacgtgcacccgggccagagagttggcccagcagattggaaggtagagttggtccctggtattgggcatggcaggtggctgacagagctcagagtcactggaagctccgcctgtgagtgcattggtgactggcttcattcattccgcatcgtgtcatccactatgtggataaacgtgtaagtgctccrtccctttttgtgggtgaataatattccactgtacggatagaccagtttgtttctcctgtcatcagcaattgcttaaatgtgcacctaggagcttatcagggctccactttctcttggtttgagccagatttcagggaagctgtgtrtgagtcctccctatctgacccaccccagtctcagatggtgcctgcaatttctgcccttctrtcccctcactcctggcattcccagtgcaggctgcaggtcgtatgtgctcaccagggtgtgcagcaggtcctgggagttggctgcaggctggctcctacccctcctcctttctcttccccygccctcactgcctcttccacggrcagttctctatgtgaggacagtggaaggagggcacctttccggagaagraagactgggttctatctagaatattccatccataatggctcctaggagaaaatgagcagctccccatcctgtttgttgagctcagctaaaagctgtccccatgccctccagtgattctcctcctagatatgtactcagaggaatcagaaacagggacccgaacagatacttgttcaggaaagtccatagcagcaccattcacagaagccaagaggcagggacaacccaaggtccatctcagatgaacggaggaagaaactgtggtccattcacacggtggaatattagtcacccacgaagaggagtggagcatgatcacatgacacagtgaggagaaaccttgaagacatggtgcggatgaagggagtggagccagccacaccaggccacatggtgtttgattccatttccattccatttccacgcaatgtccagaacaggccatggcatagagagagagggtgtctgtcactctctgcatctgtcactgtcagagctgtcagagctggaggaggagggagtggggacagactgccagtgggatggggttcccttctctggtgatgggaagttctgagctagatggtggtgatggctgcgcagcactgtggattgctaaacaccacaaatcatacgctttaaatgggttacaatggtcagttttaggtcatcagggcttcaccgctcatgcgcacacacatgcacacacgtgcacatgctgccttcaacgcctatccttctccttccagccaccacatcagtctcaacatcgatccagccgtgaaggccgtcatgggcatcttcagcctggtgacggggaagagccctctgtttgcagctcatggaggaagcagcagggaaaacctggcgctgcaaaatgtgcaggtgcccccgcctgggccggcgtcccctgggggtgggggtgcagggagcactgggacaatcactacaggatgtgcaggtgcccccacctgggccatcgtctccatgaagctcatggcaccggttacctagggacagccagtgctggggtcacagcctgtatgcctcactgaagacgtcggtcatgcagccttgttaacaaggagggggtctgtgtgtgtgttggtgcatgagcatgtgatgtgtaagagcaagagcgggggtgtaaggatgtgcgtgctcgagtgtgtgcatgagcctgagtgcaagagcaagagggtgtgtctgagcctgagtgtgagcctgagcgtgagaggttacatgagtgtatgagagtacaagtgtgtgaatgtatgcacaagtgtgggtgtgcttgtgagtgcttgtgcaaaagcaagtgtgagtgtggatgtgtgagtgtgcacaaacgtgagtgcacagttgtgtgcatgagtgcgtctgcatgagtgcacgagcatgcctgtgagcatgtgggtgggtgggtgtgcatgagtgtgagagtgcacatgactgtgtgtgagtgtgtgtctctttaatcctcagggaacagcccagacgctgtctgcctcctgagctactgcacttgactgactgctccgtgatgggcagaggaaaagagaggccgggggctccagctgctgggatctgtcctgtctctctctgtcccctttctgctgtgcctgggtggcctctcccctcctgccagtggtaaagggatggaaatgcagttgccaagctttctcccagggaccccacggctcagtcctgccaccagtgctccctctgccctcccgggctctgggtgctcccatctttgaaggcaaggcaccactgagcttgtgtgagccctgtggaggtgggaccaccccgagaggaaggcctcgggacactgtgggactctgagactctgatgttccccgaacgctagagagctcctaagctattttaattttcttgttttcaagagtttgtgggtgtgcgtctcccccgtgttcctttgcaagggaacccgttatttcctctgttgtgttttccaggctcgaatacggatggtcctcgcctatctgtttgctcagttgagcctctggtctcggggtgtccacggtgggctcctcgtgctgggatccgccaacgtggatgagaggtgagtgtggcccagtggcacgtggtggtgggcccctgaacctctcaggtctctgaaggtgatacgctgtgagattctatcatcctgtgcctttcatggcgggtttggtgcctggaatgacatcattcctctagaatttcacccaacccgagtggcagagcggatcagcatcacgttcctgcaggtggctctgggcgctcaccactttcatcagccttgtggttcttcatctctactgcgcctcaaattcatcttcccaccgccctctgccatggtcaggctcccctctttcttctaggctgttccactgtgtcttaagtcattcctttgcagctagtttttacctccaaaccagagttcattttttatgtggactgaaaatactccccttctcatattgcttccttgttcaacaaaactcagagcctccctgttgttttctggataaaattcaagctgcccctcaagtccagcagtggaggctgctagaaattcttttccagccttggtttccccacttcccttaggtgagcctctatccctctcagctcgtctgtgctgttcttagttgctccttaggagctgagggatttcaaaaactatttgtgatttattcatttgtttgtctatgcatccatctatccatccatcagttgggccatccatctatccacccatccatccatctgtccattcatctatccatctatgtatccacccatccatatatccactcacctgtccgttcatccacccatctgtctgtccatccattcatccatccatccacccatccacccatctgtctgtccatccacccacccactcacccactcatccatccaktcattcacccatctgtctatgcattcatccatccattcatctacccacacatccctccacccacctgtccatccatgcattcatccacccacccatctatccatttatccaccaatgtgtctgtccatccacccatctgtccatctatccactcatctatccatgtattcattcaccatttcatctgtccacccaacccatccatccacccatctctccctttgtccatccatcgacccatctgtccacatttcctcccttccatccatctatccctcccttttttctatggcgtgagtgtctttttttttttttttttttttttttgagatggagtctcgctttgtcacccaggctggagtgcagtggcgcgatctcggctcactgcaagttccgcctcccgggttcacgccattctcctgcctcagcctcccgagtagctgggactacaggcgcccatcaccacgcctggctaatttttttgtatttttagtagagacggtgtttcaccgtgttagccaggatggtctccatctcctgacctcgtgatccgcccaccttggcctcccaaagagtgtgagtgtcttaatcactctgcatccttgcctgtctgcagatgtgttctcttttaaaactgattttttatttttaagtcctattttatttttctaattacagaaatttgaaattaacacctgatactgtgtaaaaattctcatcctcctcatgcatattttgaccattgcttttctggtgcctctggtgcctttgtaagggactgatttttcaggaggggtgtgacggctggtgtatattctcagctctggtgtagttgaggagattgatgtttgctttggctctgcattgcttttgtagatgaggaagaatttgatctgttataaaattgtgttgtaagagttccccctcacaactcttgtccatcattttctagtatttaaaatgttaacaaagaaacaagtatttttttccagggtgggattgggttctgggagctggaaggtctctagatgccatttagaaaataaacaaacgggctgggcacagtggctcacgtctgtaatcccagcactttgggaggctgaggcaggcagatcacaaggtcaggagatcgagaccatcctggctaacacggtgaaaccctgtctctactaaaaatacaaaaaattagccgggcgtggtggcaggtgcctgtagtcccagctacttgggaggctgaggcaggagaatggcatgaacccaggaggcggagctggcagtgagccgagttcgcgccactgcactccagcctgggcgacagagcaagactccgtctcaaaaaaaaaaaaaaaaaaaaaaaagaaaagaaaagaaaataagcaaacgtaaacgtaatccctcagctgcccctttctcactgcgggacagaaggccctgtggctgcagacactcccctcatgatgtagtactgaagcccttctctctgtttcccatgctgcatctccctctgccgccttcttctcacgggtcacagccagtccttctcttcctctgtgttctggcaagaatctcaaatgtgtagtgttgatttttttaaatttccctgtaattctgttgttgaattgcttctgattctagttcagtcgcatccctgtctgctcatcaggggcctgttggacacctgtcctccctcaggctttcttcccggtggtgtgaatgagtcagaaacaattcctgttctctgcaagtgggaggagacagtgatagcccagcagataacatgtgtattgtaggaaacgtccgccgagagagctcaaggaggggaagggagagctgggagtttgtaagcagcttgcccagggagggccctactgagaagtgggtttcataaaggcctgcgggaggcgagggtgggtggagaagagcccgtgaagccctgagtcatgactcccccaggactgagagcccatcattgtctccctgaaaggcctggtcttgagtggggactggaagacctgcagagctgttttggaaagtgtgcggcgtgtcgggcagagggaggtgtgagacgtcagagacagctgtttccagaaatttcactttgaaggggaggggaggygcaggataggcrctgcagagatcactgggaacaggaaaaggagtttgctttattattagagacagggtcttgctctgtcacccaggctggagtgcagtggcaccgtcacagctcactgcagccttgacctcctgggctcaaacaatcctcccaccttagcctcccaagtagatgggactgtaggcatgcaccaccacgcctaattttttttgtttccactctgttgcccagactggtctccatttgtttatttgccttaagatactgtcaagaaaagaccagtagagagggagtggacttgctggtgcaggacagtggggatgttgctggtgaggagatgagagcaggtgaccaggcaggagggtggctttgctgggggcctggccagcgcgcccacagcagcaggaggggtgggttcagaggcaggcccaggagaaggttccagagagagcaggaggggaggggagagtgaagccagccctgcagggttaagttggggtcagcatgggaatgcagagctgagaggctgtgttgaagttaggcttctaacaacatgatttcagctgatggaagtgaccagcctgggggaaaggtccatgcagagtgcgagaggaggggacagctgctggaactcggtggtcctgtattgaaatttatggccacacytgttgctggcttcaaagtctcaccagtccgccagttcagtcttgatttcaccagaaaaagtctgcctcaattttccccctataaccgtgcctccccatccccatggtccccacttcctggctggagtttccttccaccaagatgaggcagcatcctggccccacgggtcgcaggttgagctgagctctgcactgcgggatttccccagactgtgctctctgagtcagccccggcggatttccccagtccttggcagttactggggatggaagagaaaaagtgctaagatggagactgtcatctcccctggcccatctggcccgtatcccagctcctgctgaaggagcyttggacgggacaggacagggagcgatggggtgactggggtagccctcactgaaggcagcacagggtctcacctgtccctctgttgggaccctgggggtcttacacccccgacattgcaccacagtgagggtcaggaagggtgagaaggcacggaggtgtgagtttgggagtgtcaagaaatgcatctggtgggataggcaggggccagcctggaaggccttgcaaggtcaagggcaccattgagggaattcagactgtggaagggcttggcctggcctggtatggaggagatgggtggtcagccaggagtcccgtggagaacctggaggcctgcaccagcgttggcagcggggtggggtggagaaggacggctgtaacccaggatcacaaagtttgtgccttcaacaacacacatttatggtccctcagttctgtaggacacaggtccagtatgggtcccctggctcaagtgaaggtgtggacacagtgggttccttctggagaccctggagagaatctgtttcccgccwtttccagcctctggagtcccgccttctttggctcacgacgcctcctccgtcttcaccaccagcggcctcgcgtctctgcctttcccctgcagtcagggctccctcaactctcactttcacccccttcttttaaggacccctgtgattgcatttcaggcccaccctgcaatccagcatcactcccacatctcaagtccccagctgagtccatctgcaaagtccctttggccctgagaggtgacagagtcacaggttctggggattaggacgtgggcaccttagtgagagatggattcttctgccgaccacaggcctcagagttgacaggcaggggaggggcccgcggccgcccgggcagcagagtgtccacgtgtgtccagtccctgctcactcccgacaccccaagacctctgtccctcagctctgttcagacgactgctcccagctccgtgctggtgacccccgaaatctgcctgccatccccggcgtctcctctggtgcactcaaaggccctcctgggtcctctgcagcctctgccacctttgcgggttgctctgggacttctccgggatgcttgaatatgccacacttctggcttcagggcccctggaagaagcgactccctggctggccagggttgatggagtctgcggccccttgggaacccgcgctctttctccctctccctgcagtctcctgggctacctgaccaagtacgactgctccagtgcggacatcaaccccataggcgggatcagcaagacggacctcagggccttcgtccagttctgcatccagcgcttccagcttcctgccctgcagaggtgagtgtgctcacgggctgtggctccacagccacggggctcctctcccagcacggccccggccaycctggcccacactcaggctccttcgtagctcctgttgcctgctgaatggtcctgcccctgagctggcacttgaggcctgcaaccaagcctccctttcttcctgtggtgcctccacagccccccggctccggccagatcacggagctgtggcctcctgcctcccccgcctgccctgcctcccttccctgccgtccccatgcygatgcttggcaggccgaggctcgccacatctgagcagagcgcctgtgctttagcagtgactgcagatggatcagtgtccggacctttcttcggcctttgccgaggttccctgccacgggaatgtgttttcttctttgcttatcctcactggagtgactgtgccccccaggggacatcaggcaacgtctgcagacatgcttagcttcgccacacggggtgtgctgggtgttagcaggtagaggccaggggtgctcctcaatgtggcgcagtgcacaggccattgacattccctacagcagagtcccctcgacctaggtgtgcccggtgcccagtggactggcccttcactgtgcctccatctctgcctctcctcctggggtcgtgaggccacaccagtgcccacactcctcagcccaggatgctcaccyccgctggaaagcccagcaccgcaagccttggtgacgtcctacccacggtgaacggagtggccgggaccagcgtactcgggaaacttagtctggggattctctcccagakctcacaccaccctcgcagctgcactgaccgacctctgtgtgttttggctgcagcatcctgttggcgccggccaccgcagagctggagcccttggctgatggacaggtgtcccagaccgacgaggtaatggcggtggctttgccatgatgcttcctgccctcctccccacctcctgtgtggtggtgctggctcttcctacctccctcctgaccccaggacagctgcatcgctgtcactgggtccctggcctgggtgcccagggctcagtgtcagtcacatccctggcctttgacacttcaattcacttcctcatggttggcgccccagaaagaggatgacatggtgggaggggagggagagcagatggcgggcggaggaacgcaagttcctcacaggcaggaggggcatctctgctcgtgttttagagcgatgtaggaggagaattgccctcgactcctccactgcatgctggcccttcgtgatgaggcccaggctgtggttggtagcttagtggatgctgggggaagtggctgtgggctttttatgataaaatccatgacactccagcctcttaggtcaccaggacttgctgctatagtttcttccaagcgttttctagttttcgtccttacatttaggtctgtgatctagttgagttacttttgtgtgtggtatgaggaagggcttcagtttcattcctttgcatgggaatatccagtggtcccagcaccatttgctgaaaggatgatcctttcccccagtgatgtatcttggcacccttgttgtaaatgtaggatttatttctggacactcaattctgttccatagatcttttctgtttttccttatgccggtcccacgctgtcctgattattataactctgtaggaaggattttgggtactctgagtctcttgaacatccatatgaattttgagatcagcttgtcaatctctggagaaaamaaagcttttgcgttttgacggggactgcatgacactatagatcagtttggagttcggggagtttcgccatcttaatcataagaactcttctgatccatgaacatgggacatggaatgtcttacttatttaagttgtctctaaattttttttttttttttttagacaatgtctcactctgttgcccaggctggagttgcagtggcacaatctcagctcactgcaacctccacctccctggctcaagcgattctcctacctcagcctccggagtagctgggattatgggtgtgcatcaccatgyctcgctaagttttttgtatttgtagtagagatggggttccaccatgttggccagaacatgaggcctcggactcctggcctcaagtaacccgcccgccttggcctcccaaagtgctgggattacaggagtgagccactgagcccggcctctaatgtctttcaacagtgttttttctagttctcagaatttaaggttgcacttcttttgccaaatgtatttcaaaatattttattgtttttgatactctggtgagtggaattgttttattaatttcatgtgtagattgttcattgctagtttatagagaaacacagttgatttttgcatattgaccatataccctgcaccttgttgagctcatgtattagtgctcagagctttttagtaacctccttaagattccgatttacaaggacatgccatcgcagctggagagaatttctgccaggcctgatgatcctaacccagggcaggcccaggctgatggatgtgtttgtgttctagtttttaacaaaaaatgttaaaaagcaaaataaaaaaaaaatcatttttttaatagagaaaagcttatagaataagaaaaaatatttttataattagatccgtgaccctccaacttccttaggtcacaaggatttgctcctataatttcttccaagagttttatagttttagtccttatgtttaggtctgtgagccagttgagttaattcttgtgtgtggcagctgacaatgtatttgtgttttaagctgttattatatgagtcaaacaattttttttaattaaaaagtttataaggtaaggctgagcatggtggctcacgcctgtaatcccagcactttgggaggctgaggtgggcaaatcactgaggtcaggagttccaagaccagcctggccaacatggtgaaaccctgtctctaccaaaaaaatacaaacaacaaaacaaacaaaaacaagaaaagtttataaggtataaaagttacaataagctaaggttaatttattattgaaggaagaaaaatatatttgtattaattgactgtagcctaagtttacagtgcttggaaagcccacagtagcacagtagcatcccaggccttcccattcacccacccctcactccctgactcacccagagcggcttccagtcctgcaagctccagtcctgggaagtgccctatgcaggtgtcccatcttttaccctttctactgtatttttatcgtcccttttctacacttagatacataaatacttagcattatgttagactggcccagagtattcagtacagcaacatgctgtgcacgtgtgtagcctaggagctcaggctgtaccatggagcacaggtgcataggaggctagaccatctggatgtgtgtaagtgccttgaggatgttcacacgacgcagtggcctgtctatgtgtttctcagaacgtatccctgtcattcagtgatgcgcgcctgtctttcttgatgatccaaaaatttcttttgttttgttttgttttgtttctgagatggagttttgctcttgttgccaaggctgcctggagtgcagtggtgcgatctcggctcactgaaacctccgcctcccgggttcaagcaagcaattctcctgcctcagcctcccgagtagctgggatttacagacatgcacctccacgcctggctaattttgtatttttagtagagacggggtttttccatgttggtcaggctggtgtcgaactcccgacctcaggtgatccacccacctcggcctcccaaagtgctgggactacaggcgtgagccaccgcgtctggccaatccattgatttctataaggtctgtaaggtgtctgtctttcattactgattttagttgagtcttcactcttttttcttggtcattttagctaaaggtttgtcaatttttttttttaatctttccaagcataactttttgttttgttgattttctctattgtctttcattaatttccctctgatctctgtcatttccttcctcgtgctggctttgggtttcatttgctcttctttttctagtatctcaaggtggaaagttaggttrttgatttgagatcttttttcttttttaaggtaggtgtttatagctacaaatttccctcctagcactgcattcagtgcctcccacatgttttggtctgttgtgtcttcatttcatttatcaaagtattttctgattcccttggtgacttcctccttgatccattgattatttaggagtatgctctttaatttccacgtatscrtgaatttccaaaatttctgttactgaatttgtacttttattccaatgtggtgagaaagcaactttgtatgacttcaacatttaaagttgtctgaggcttctctmgtggctcagcagatggtctgacctgggaagcgtcccgtgtgcccttgggaggaaggtgggttccgctgccgctgggtgcagtgccctgcaggtgtgtgccaggtctccctggttgacagagttgttcgtatcttctgtttccttgttgatttttcatcttagttgttctgtccattattgaaagtggggtattgaagtctccagctattattgttgaattgaaggaattaaatgttacactggaaaatgctcacttcatgggaaagaaaccagccaagcagccacttgtgcgcaacccgtcaggtgctggggaccctgtggtgagcaacacagacgtggccactgcagtgaaaacacttagcgtcccctggagggacggacaagaaggcccagcggtggctctggccatactgtctgatgatggccctggggtgtggtaggaatgagagggaatgggagcagatcttgaacaatggaaagggcctgggttgtatgagcctcggggtaaaatcggctcctctgagcctggcttgaagcatttgttgcctggcgctgtgatagtgataccagcggcaccctgtggcctccaacatggcccagatttcagtgagccctcggccctcttcttctctgagtcccccacacttcagggcacgggctcaggaggacagcagacaggctgcatctgctccatgagccacaccttccatggatgatttgtggagctactgtsactaatgacccagtggcgtaaaacaacaggaattgcttccctcacagttccagaggccagggtctgaaatcaaggtgttggcagagtcctggtccctccgaaggctctagggcagtggtccccagtcttcttggcaccaggaactggtttcgtggaagacaatgttttccacaaacagagggttggagatggctttgggttgaaactgttccacctcagatcatcaggtggtagattctcataaggagcatgcaacctagatccctcgcttgcacagttcacaacagggctcgcgctcctatgagaatctgtgccaccgaggatctgacgggaggcggagttcaggcggtgatgctcactcgcccctcccctcacctcctgctctgggatccagatcctgacaggccagggaccagtacctatccatggcctgggggttggtgacccctgctctaggggatcctttcttgcctcttgcgtcttctggggactccaggtgttccttggcttgtggctgcatcactccatcctttgcttccttcttcccgcagtttcctccctttctccacgtgtcctcctccctttctccacgtgtcctcctggccctcgtaagakatgtcattggatgcagggcccaccccacattcagagtcatctcaccttcagattctttacttaattacatctgcaaagacgttttatccttttctcttttcttcttcttcttttttttagagacagggtctggctctgtcacccaggctggagtgcagagctgcaatctcggctcactgcagccttgatgtcccaggttcaggtgatcctcccacctgagcacccacaagtagctgggactgcaggtgcacacaccaccacacccagctagtttgttattttttgtagagacaaggtcttgccatgttgcccaggctggccttaaacccctgggctcaagcagtcctcccacctcggcctcccaaagtgctgggattacaagtgtgagccactatgcccagcctacactctttttccaaataaagtcacatccccaggaactgggccttcagacatgagcgctccttggtgagccaccgttcacccgttacggtcctccaaaccaaatgcctggttcttcgttgctgttttccaaatgctacctcctkactggctgactagcaatggggagtaaagcccacctctgctcctgcctctctgggaaagtattgcctccttggtctctggttcccatctccaaaagaagctttaggctctycccccgctgtgacttgctgtcatcatggaacagatttttgttgtgcacaggaagatatrgggatgacatatgcggagctctcggtctatgggaaactcaggaaggtggccaagatggggccytacagcatgttctgcaaactcctcggcatgtggagacacatctgcaccccragacaggtaaagcctgtgagacgcatcacagagggaggccagttaggtaatgtcccctttgcagaggccggtttgacctgtaggaacaagtagataacagtgtgaccctaacgtaataaaactgtatctcacacagtaacacttttcagttatttttacccactctgatcttctgctggcccaaagttaatctgagtgaggctcacccacagccaggtaaacaygacatgaaacaagcctccctttttttgaggatagaatgtaaacttcagggtcagaatagtattgcttttctgcctgttgtgagtcttgctrgggctgaagcccacaagcattgtagtccartggaacctcytggaagccttgtgaaataaatcttcgcaggatttatcttagatctcccaaggcagcatgccacagcatcagaggcagggagaccccagtttcacagcatcaaaggcagggggaccccggtttcatagcatcagaggcgggggaccccagtttcatagcatcagaggygggggaccccggtttcatagcatcagaggcagggggaccccggtttcatagctcggccagtgtccccggcctgagcacgggcatcccccacacctgccatcgtggaaggtcctgtgcggggagtaacccattagtcatttgcttgtatgatccagcatgggaattccggcctggggtctctccagttttggtaacatgaagctcgtgtgttgcaygcccaccaggtcgctgacaaagtgaagcggtttttctccaagtactccatgaacagacacaagatgaccacgctcacacccgcgtaccacgccgagaactacagccctgaggacaacaggtttgatctgcgaccatttckgtacaacacaagctggccttggcagtttcggtgcatagaaaatcaggtaaatccagcagaaatgtttctctctccatgtttcatgtctgtagaagaaacgtgakgttatttccatgaaggattgaaaaactttcttatatacacagtaacttttttactgtcctcctttctgcaaagggacaagtatgtttaaagcgttttttaaatttacttttttcgtgttgacaaataaaaattctatatattgatggtgtccaacatgacatttcgatatgtgtgtcacagtggaatggctaagtcaagctatttcacatgtgcgtgccttaccccacacgcctattatttgtgtgtggtaagagcacttaaaatctactctcttagcaattttcctatattaactacagtcaccatgtcatgcactggagctgttgaacttacttcttttgtggcctttgaccaacaatctccccacccaccagcccctggtagccaccrtcgcactctctgcttccacaagatcaccttttcaagattccacagacgaatcagaccatgcggtatttgtctttctctgcctggcttatttccctttaagatgttcatgtaggttcatccgtattgttgcaaatggcagaatttccttctttcctaaggctgcatagttctccactgtgtgtgcaccgcactttctctatccactcatccatcggtgcgcgctcaggctgattccacagctgtgctgttgggaatggcgctgtggtgaacgcgggcgtgcagatgtctcgtcggcagatgagttcatttcctgtcagttatacccggtaatggggtggctggatcgcagggtagttctatttttaatctttggaggaatctctgcactgccttccacaatggctacactaattgctgagtgtgtttagagtctggcatgcactccttttggctaggctctatttgctggcattacataaactaaaattagcagctggacacccctctatgagtatggtgacaatcactgtcgtttctaagtagccagggtatccagatggcgtcatggcttccaacccaccctgctttccttttctttttctaattaattattaatagaatcaagaaaggacaatacaatcaatgaaaaaggataggcccttcccttttccaaagccagtttgggagccatgacagagcagcttggccatggcctccctagcgcaggggatcatctgacgagaggagagagccggccagtgagtcactgtcaacaatgataaatcagaggccggctgcaatggctcacgcctgccatcccagcacttttgagaggatcacctgaccccaggagttggagaccagcctgggcagcatggcaaaaccccatctctacaaaaaatacaacaattagccaaacgtggtggtgcacacctgtggttccagctacttgggaggctgaggagggagaatcacctgagccaaggagatggaggctgcagtgagctgtgatcgtgccactgcactccagcctaggtgacagagccagagcctgtcgcaaaacaaaatttaaattaaaaaaattaaaaacagtgataaatcctgaggagtctacactgagctagaggacacctagtgtccttccagcacctgtgagaccatagcacagtgtgatcagtgcacaacagaggcacacacaggtgctgtatgaccacagagtagtaaccttctaatcaggaagatgtcttgaactcttccttaaggacatgaggaaaacccgcctgtgctgagctagaggccacaagatgccgctttatacctcatgatcggtgacagcatctctgagcaggtggcctgtaaaacgagggtggatcagtggcaggggttctacatctgggaccgttgaccccccgaggagacattaggcgatgactggagatgattttggttatcatgactgggctggggtctgtgctcccagcatcccgtgggtggagcccagggatgctgctgaatgtcctactgtgtgcaggatgggcccctcccaaccccacacccagcagagaattctttgttccacgtgttggtggtgccaaggttgaggaatgctgaacatttgggactagaagacrtttggggctgcatggttgtaaggaagagatactgtatctggctgatttccgtggaaaggaacttgctcaaagagtgacttagagggtggaagggagggcaggggtcacagggtctggaaagctgggactcaggccaggtggctgctgccctatatcccctgctgtggctggacggagcccacacgccacacccagcctgggctggatgccaatctgctctgccatccctgagtcccagtgtccctgggtcaccaggcagtggagtggccaagcctcgggtgatgggccctgtcatctggccacccagggcaggagagggagctgccccagctctggcctctgtagtgggaggtgggggcttggctcccaccaagatgtactcaggggcgggctcccccagatcaggaagggggttcagacactatgcagccaaaagagtgacgcatgtgggagcatcagagacagctgcaggtaaaggtggagacgctgctgtcatctgcagtgacagctatgcgtgwtctggacccgcccctccaggcttttccagcacacacgcccagcatctggtggggactctggtaatttactttttcacctctgggacttgtgayccgcttttggtgcgtgccagtgtttcaacagccccacagtccgtctttgcggggctgtggtgtcacaggcctctctttccaggtgctacagctcgagagggcagagccacagtccctggacggcgtggactgaggccggttccttcctggaggcctcctgtcctcggggaccccagcacctcatcatcagcattgctggagccaagggtaggagccctacactaggagcccaggatgggacggcgcatcagccgagagggagggaacttttcagtcaaattcctcaaaaagaggctggaataaagcctgggcttaaaaagaggctggaatccaatgcacatgattttgacctcccgccagcgtgcgcttccccgcgaagtctggcattctccgaaggaagccgcctgggtaggagggttccaaccgccgccccgtgtggcatctttgctgcaggaacaagaacagtagctcccgggaagggaggggtgtcatgagcagaaaatgaaggagagaagaccttctctcccacccacacacaccttcctgtcctgggttccagaaggttctggggagatggtccctgcagagctttcttcctgggagtctggggaccagtcggccttactcctgtcctgtgggagaaccaccccatctaggcatggggccaggtgtggggcaggggcgtggcactgtgggtcccccttcctgctgatcttcatgccattctgggcacctttgtctctttatggaatggggtgaggagcggcttttctgtcctctccagagctccccttggtcctggaaccctctctcccgggttgccccagggagtctcagcctcccatccttgcagggtgaagatgagacgaagatgggtgcacaggccagagcctccaggggagtggagtgggtttgggatctgtgctgcccaccgggtgtccgctctttctctcccccatgtctggcccctctgcctgggacactcctgcttcccagcctcacctagagccccacaccaaacccagggcccgggctgggacacagaccacagctgagggtgaatttcccaggaggtgctgtcgggatagcagaaagtgggggacactcggcaggtgctgtctggatagtagaaagtggggggcactcggcaggtgctgtctggatagtagaaagtggggagcactcggcaggtgctgtcgagatagtagagagtgggggcactcggcaggtgctctctggatagcagaaagtggggggcactcggcaggtactgtcgggatagtagagagtgggggacactcagcaggtgctgtctggatagcagaaagtggggggcactcggcaggtgctgttgggatagtagaaagtggggggcactcagcaggtgctgttgtgatagagagtggggggcactcggcaggtgctgtctggatagtagaaagtggggggcactcggcaggtgctgtcgggatagtagagagtggggggcactcggcaggtgctgtctggatagtagaaagtggggggggggcactcggcaggtgctgttgggatagtagaaagtggcgggcactcggcaggtgctgttgggatagtagaaagtggggggcactcagcaggtgctgttgggatagtagaaagtagggggcactcagcaggtgctgtcgggatagcagaaagtggggggcacccggcaggtgctgtcgggatagtagagagtggggggcactcggcaggtgctgtcaggcggagtggtcaccaccgttgttgtcttctccgtcacttcctccagagtctgttacccacgtcacatcgtggatgccccctgcccggataggtctgagtgcactggggtggccggcaccccacaccttctcagggagcacccagcaggatacctgagattctccttaggccttggatgggagctggaggcttctggctgcctcctgcaccccagatgtgtggcaacggggtggggagtgtgtcacccgaaagatgatcaggtgaggctgggaccctgaaggcagccccatcctgtggaattaccctcggaggctccaaaacttcccacctgcaggaactgagctcaggggcaccagaccctggtccccaaccttcaagttatagggtggtgtcccccagttacagggcagtgtccccagttacaggatactgtccctcagtcataggttagtatcttctggttacaggatagcatcccgtcagttacagggcagtgtccccccagtcatagcatagtgtatccccaagttacagggtagtgtccccagttataaggcaatgttcccccattatagtgtccccagttatgaggtaatgtctcccagttacagggtaatgtcccccagttatagggtgatgtccccacagttatagggtgatgtccccacagttatagggtgatgtccccacagttacaggtgaatgtccccccagttatagggtgatgtcccccagttataggtgaatgtctccccagttatagggtaagtccccacagttatagggtgacgtccatcagttatagggcaatgtctccccagttactgggctgtgtcccccaattacagggcaatgtcccctcatagtgtctcccagttatacagtattgtccccccattataaggtagtatccccagttactagatagtgtcccccagtaacaggataatgtcccccaattgcagggcaatgtcccccattatagtgtccccaagttataagctggagtcccccagtaacaggataataggatagtgttccccagtacagggcagtgtccccagttactcactagtgtcccctagtaacagggcagtgtccacccagatacagcctagtgtccctcagttacacaatagtgtgtcccccagtggtaggacagtctactactgagtcctcctggcatgagtcgagctgagattaggatagggtaatgacccttcagttttggggaagggaccagagctcggccagtgagaagcttccagctccgtctggccatatccaggctgctgagggtcctgggctctgtccttaaacctcatcactgacatgacccagcaaacctcctcaagaggaaaaagtccccttgggtcaaacacagcttgtgcagttctcggggacctcctcctgccatcctggggatgctgtggagaatggagatgcacagggggctttgtcctctcctctgccttttggagaaaatatttcactcaaggcaaacgcagcctgagggcagcacaggggaccccaaggctcactgcgcatttctagtcgcccccaaacgcgtgggttttcctcctgttctcctcgtgggtgcctttgctcattctcatcctcctgttctcatccagtctgcccagtctgaccggctcccagcagcatccgcccaaaagtttctcccatgacagcaggaagcagcctcagacaatacatgatggacaggcctggctgtgttccaatagaaccccgagtcagtcagcccgagcctccctctcagctggatactgttaatgacaggggtacacattcccctcccctttccaatgttttaaaactctaggacagtgattctcaaacactttggtctcaaaacccctaagagcatttgcttatgtggcttttatctgttgatagttgctacctgagaaattaaaactgagaaatctaaaaatagatttattttaggaagtcactaaaaataataagcccattgcatgttaacatgaaatagcatatttttacaaaaaaataaattttctaaaaacaaaacatctaagtgagaagagtggcattgttgtacttgttttgcaaatcttttcagtgtccggtttatgagatgacagcactttggtttgttgccaaccattcacttataaagaaacccttttccaataattagctggggctggtgctagagcaataccagaagttcagcgatgtctgtagatttgtccaaatgtatgtgaagagactgtgtttactcagtttttatgtttgcagttaaatcttcaatttgatgagttattttatcattgcaaagtggcagtgtcagggtttcctttattgacttatccagcaggcattcagctatatcaactctacatatgaagtaaggagttgaattaagcagagtagttaataaaaagcttttttttttcatgttttaaaaatgtgacgttgtcaggcctctgagcccaagctaagccatcatgtcctctgtaacctgcacgtacacatccagatggccggttcctgccttaactgatgacattccaccacaaaagaagtgaaaatggcctgttcctgccttaactgatgacactatcttgtgaaattccttctcctggctcatcctggctcaaaagctcccctactgagcaccttgtgacctccactcctgtctgccagagaacaacccccctttgactgtaattttcctttacctacccaaatcttataaaacggccccacccctatctcctttcgctgactcttttcagactcagcccgcctgcacccaggtgaaataaacagccttgttgctcacacaaagcctgtttggtggtctcttcacaccgatgcgagtgaaaactgttttatttctacccgcaggcggggcctgccagaggaggtgggtgtgctgggctcaggggacgtgtgggctgtgaggaggagatggtgacaggaagctggaaggaaagggggtggctttggaggccaggccgaaggggccctcaggtctgcttgtagggtgggatagccttgaggagggagtcatggcaatgcacagccaggctgccaattttgaattaagaaattcttggaaatctagctgcctgttactgttgacatccagtcttttcgtcatgcagtcaaggacactgcggtccttctgcttctttgtgacggcagcctcttctgtgttcatgaagcttaggaactccgtcttggagagagcagttgtaaccatcctctccaggatccttctggaaaacagcaatcagggactcaatgcaccactcagtctctgcagggctggagatttttgccaggttgtagctgagtgaggcatgggaggctgtacttgggagtggtgtggagacctctggtaaaaagcttttgaaaaggatgattctattccattaggattggcttatatgaggggaaaaataggattgtatatagttaaagaaaaaacaattcattggcccatgtcagatctaacaaatcaaaacacatggaagctgtggcgtcctaatcagggaaaaggagccagggtggcaggaccaagggaaagcaaaaagagaaagcagataagctacaagtctgcatttcttcacagtccagcacacacagccctcctgtgcatatagctcacaatcttcccatgcccaggtatcaccagaccctcagctgatagaaaaatgcaagttagctcactgcaaccttggcattgtaggtattgtatgcagccctcttcagcacatggcccaggaaccatcctgtaaaatcccctgcaagcctttgtctccttgcagtcagctcctcttctcctggcctgcccattgccttcttgcaatgtactttcttcctttctttaataaatctgcctttttttaaaacctacaagtttcttggtaaactcttttacccctgtgacaccagcctcagatagtcgccatcacccaccatagaagctactcctggagagctgattatttttaatttgcagataatttattcgtgtatttttcaaatacgtattgcgactcctcttctggttctgatggaacagctcatatttgagctacagaatcactgagaacaagtaggaaagccagaaaaaattaacacaaaacagcagttgaaagcactagagagaaacccaggtgtccaggacaggaggtgcctggatcctggtgagaagggaaatgaatgcatcaggtgccagcgctccactctcctcccgtggggcctctgcccattcgttagcgacagagagaacaagagcacaagcagaaagcagctgaggcattggcagttccttccgaaaatcagactttagggtgacaaaggcagccagagcttgcagggcaaagcttccagggaaaagaagagctcagagaagtgagtccagtgtgcagcagctcctcttcccttgaagattatgaaactgcctggggaaagaggacaaggagctaagcaaaaagcatccatgaagagcctttaaagcaaaacagagattatggaggttttgtagctctggaaaataaatatttaattttaggattaataagaaagggcttggtaaaaacttaaggctttctattgaaacccctcaagactatatactgggagaagtacaggccagaaatagagactccttcacaaagaataaagcctggcctcttatcttactgcctcactggatcaatgtgatctgctgcttgtctaactgtttcgcagaaggaaaacaaatggtctctgcaagaaagtaacatcactcaaaacctttctcagttttttatactctttatctggtattcaataaaagatcactaggaactctataaaaatatacttaaaatgtaatataaatcataa

SEQ ID NO: 94648 - DNA, 28231 bp, Homo sapiens
  misc_feature (1)...(28231): n = A,T,C or G
ggggggcagtggctcatgcttgtaatccgagcattttgggaggctgaggcgggtggatcacgaggtcaggagttcgagaccagcctggccaacacagtgaaaccccgtctctactaaaaatacaaaaattacctggacgtggtggcgggcgcctgtaatccaagctacttggagggctgaggcaggagaatcgcttgaaccggggaggcagaggttgcagtgagctgaaatcacaccactgcaccccagccgggatgacagagctagacttgtctcaaaaaaagaagaaaaaaaaaaaaaaaaaaaaagcatgtcccaaatattgcacgagatatatttatactaaaattttatttgttgtttctctgaaattcacatttagccaggcgatttgtattttgccaccctgctgggagcacccagtggaggagcccttccatccttggggctggctgaggctggaggaccaggcagaaaagagggttggggtttgatccctgctggtgaaggggcaggttcccggggggtcgcggagggggtctagacctctagtcgagggctgctttccctctccgtgcagatgggcggcctcacggctcaggctgccagctggactggcacagtgacagcgcgcgtgacccagcgagccgggcccgccgccccgccgccggagaaggagcagccactgctgcctccaccgccctgtccagcgcagccgctgggcaggccccgatccccttcgccccccgagaaggctcagccgccttccccgcccacggcctcggccctggattatcccagcgagaacctggccttcatcgacgagtcctcggatacgcagagcgagcgcggctgcccgctgccccgcgcgccgagaggtcgccgccgcccaaatccccccaggaagcccgtgcggccccgcggccccgggcgtccccgagacaaaggcgtgccggtgtaggggcaggatccctggccgggcctctcaagggcttcgtttctgctctccccggcatgcctggcttgtttgaccaaagagccctctttccacgagactgaagtctggggaggaggctacagttgcctctccgcctcctccctggccccggcccttccctcacttccatccatctctagacccccccaaggctttctgtgtcgctgccccgggcgggtgtatccctcacagcacctcacgactgtgcctcaaagcctgcatcaataaatgaaaacggtctgcaccgctgcgggcgtgacgctcccggacgcgagtgggtgtggaattgctttcctcgggccaccgtgggggcacctctggcctcccgtgacccccaggccgagggtccccgggcacccaggtcggtcaagtctcggccctctcaggcccgcgtctctgcctggaggagactgtgtagggtccggcgtggggatcagccgggatgggctgcgcgtctccagcctctgcacacacattggcgggtggggtgcagggagggagaggcaggggagagagaatggcatctcgcgtggagggctgtcgtttgaactctcccagcgcgagagaccctgccccgcccccttcctggagcgttgactcccttctcgtctcgaggcctgtggcgtctgggtccgttggggcagaaccatggaggaaaagccttcgaaagtaagacgtctccctaggccccttaccctgtccgctccaacccacccttggtccgactcgggcccctggcgctatttcttactcagccttggctgcccgcagcccccacccaaccccacgttctacgggatccccaacccggcccggctcagttccccagcccgctcttccttcccgctccagccatccgcgacccttggctccctccttgtatgtggcccacaggtgtcgctcaagtcttccgaccgccaaggctcggacgaggagagcgtgcatagcgacactcgggacctgtggaccacgaccacgctgtcccaggcacagctgaacatgccgctgtccgaggtctgcgagggcttcgacgaggagggccgcaacattagcaagacccgcgggtggcacagcccggggcggggctcgttggacgaggggtacaaggccagccacaagccggaggaactggacgagcacgcgctggtggagctggagttgcaccgcggcagctccatggaaatcaatctgggggagaaggacactgcatcccagatcgaggccggtcagtgtggcctcgccaggccgtgggcacccgcagggcaataagctggccagggactcaatttctggagctgtaaaatggggggaagctgatgggatccaagtttctaggattctctgggagaggcgcccgcgccaatctttcgccctttaaatccgccaggcattcttggagcgccccctcccgggcaggcgttgtaacaggcctttcggtcgtgacgcgcagagtccggggaaggacgcaccaaataaattgcgcaaagaccccgtggtaggacctgcggggtttttttgtttcgtttgttttgttttgttttgtttttgagacaggatctcactctgtcgcccaggctggatggagtgcagtggtgcgattatagctcactgcagttcaagtgatcctcccgcctcccacttttttttttttttttttttttgagacggagtctcgctgtgtcgcccagactggagtgcaatggcacgatctctgctcgctgcaacctccgcctcccgagtagctgggattacaggcgcgcgccaccacgtgcggctaatttttgtatttttagtagagacggagtttcaccatgttggccaggctggtctcgaactcnnnnnnnnnnnnnnnnnnnnnnnnnnnnnnnnnnnnnnnnnnnnnnnnnnnnnnnnnnnnnnnnnnnnnnnnnnnnnnnnnnnnnnnnnnnnnnnnnnnnnnnnnnnnnnnnnnnnnnnnnnnnnnnnnnnnnnnnnnnnnnnnnnnnnnnnnnnnnnnnnnnnnnnnnnnnnnnnnnnnnnnnnnnnnnnnnnnnnnnnnnnnnnnnnnnnnnnnnnnnnnnnnnnnnnnnnnnnnnnnnnnnnnnnnnnnnnnnnnnnnnnnnnnnnnnnnnnnnnnnnnnnnnnnnnnnnnnnnnnnnnnnnnnnnnnnnnnnnnnnnnnnnnnnnnnnnnnnnnnnnnnnnnnnnnnnnnnnnnnnnnnnnnnnnnnnnnnnnnnnnnnnnnnnnnnnnnnnnnnnnnnnnnnnnnnnnnnnnnnnnnnnnnnnnnnnnnnnnnnnnnnnnnnnnnnnnnnnnnnnnnnnnnnnnnnnnnnnnnnnnnnnnnnnnnnnnnnnnnnnnnnnnnnnnnnnnnnnnnnnnnnnnnnnnnnnnnnnnnnnnnnnnnnnnnnnnnnnnnnnnnnnnnnnnnnnnnnnnnnnnnnnnnnnnnnnnnnnnnnnnnnnnnnnnnnnnnnnnnnnnnnnnnnnnnnnnnnnnnnnnnnnnnnnnnnnnnnnnnnnnnnnnnnnnnnnnnnnnnnnnnnnnnnnnnnnnnnnnnnnnnnnnnnnnnnnnnnnnnnnnnnnnnnnnnnnnnnnnnnnnnnnnnnnnnnnnnnnnnnnnnnnnnnnnnnnnnnnnnnnnnnnnnnnnnnnnnnnnnnnnnnnnnnnnnnnnnnnnnnnnnnnnnnnnnnnnnnnnnnnnnnnnnnnnnnnnnnnnnnnnnnnnnnnnnnnnnnnnnnnnnnnnnnnnnnnnnnnnnnnnnnnnnnnnnnnnnnnnnnnnnnnnnnnnnnnnnnnnnnnnnnnnnnnnnnnnnnnnnnnnnnnnnnnnnnnnnnnnnnnnnnnnnnnnnnnnnnnnnnnnnnnnnnnnnnnnnnnnnnnnnnnnnnnnnnnnnnnnnnnnnnnnnnnnnnnnnnnnnnnnnnnnnnnnnnnnnnnnnnnnnnnnnnnnnnnnnnnnnnnnnnnnnnnnnnnnnnnnnnnnnnnnnnnnnnnnnnnnnnnnnnnnnnnnnnnnnnnnnnnnnnnnnnnnnnnnnnnnnnnnnnnnnnnnnnnnnnnnnnnnnnnnnnnnnnnnnnnnnnnnnnnnnnnnnnnnnnnnnnnnnnnnnnnnnnnnnnnnnnnnnnnnnnnnnnnnnnnnnnnnnnnnnnnnnnnnnnnnnnnnnnnnnnnnnnnnnnnnnnnnnnnnnnnnnnnnnnnnnnnnnnnnnnnnnnnnnnnnnnnnnnnnnnnnnnnnnnnnnnnnnnnnnnnnnnnnnnnnnnnnnnnnnnnnnnnnnnnnnnnnnnnnnnnnnnnnnnnnnnnnnnnnnnnnnnnnnnnnnnnnnnnnnnnnnnnnnnnnnnnnnnnnnnnnnnnnnnnnnnnnnnnnnnnnnnnnnnnnnnnnnnnnnnnnnnnnnnnnnnnnnnnnnnnnnnnnnnnnnnnnnnnnnnnnnnnnnnnnnnnnnnnnnnnnnnnnnnnnnnnnnnnnnnnnnnnnnnnnnnnnnnnnnnnnnnnnnnnnnnnnnnnnnnnnnnnnnnnnnnnnnnnnnnnnnnnnnnnnnnnnnnnnnnnnnnnnnnnnnnnnnnnnnnnnnnnnnnnnnnnnnnnnnnnnnnnnnnnnnnnnnnnnnnnnnnnnnnnnnnnnnnnnnnnnnnnnnnnnnnnnnnnnnnnnnnnnnnnnnnnnnnnnnnnnnnnnnnnnnnnnnnnnnnnnnnnnnnnnnnnnnnnnnnnnnnnnnnnnnnnnnnnnnnnnnnnnnnnnnnnnnnnnnnnnnnnnnnnnnnnnnnnnnnnnnnnnnnnnnnnnnnnnnnnnnnnnnnnnnnnnnnnnnnnnnnnnnnnnnnnnnnnnnnnnnnnnnnnnnnnnnnnnnnnnnnnnnnnnnnnnnnnnnnnnnnnnnnnnnnnnnnnnnnnnnnnnnnnnnnnnnnnnnnnnnnnnnnnnnnnnnnnnnnnnnnnnnnnnnnnnnnnnnnnnnnnnnnnnnnnnnnnnnnnnnnnnnnnnnnnnnnnnnnnnnnnnnnnnnnnnnnnnnnnnnnnnnnnnnnnnnnnnnnnnnnnnnnnnnnnnnnnnnnnnnnnnnnnnnnnnnnnnnnnnnnnnnnnnnnnnnnnnnnnnnnnnnnnnnnnnnnnnnnnnnnnnnnnnnnnnnnnnnnnnnnnnnnnnnnnnnnnnnnnnnnnnnnnnnnnnnnnnnnnnnnnnnnnnnnnnnnnnnnnnnnnnnnnnnnnnnnnnnnnnnnnnnnnnnnnnnnnnnnnnnnnnnnnnnnnnnnnnnnnnnnnnnnnnnnnnnnnnnnnnnnnnnnnnnnnnnnnnnnnnnnnnnnnnnnnnnnnnnnnnnnnnnnnnnnnnnnnnnnnnnnnnnnnnnnnnnnnnnnnnnnnnnnnnnnnnnnnnnnnnnnnnnnnnnnnnnnnnnnnnnnnnnnnnnnnnnnnnnnnnnnnnnnnnnnnnnnnnnnnnnnnnnnnnnnnnnnnnnnnnnnnnnnnnnnnnnnnnnnnnnnnnnnnnnnnnnnnnnnnnnnnnnnnnnnnnnnnnnnnnnnnnnnnnnnnnnnnnnnnnnnnnnnnnnnnnnnnnnnnnnnnnnnnnnnnnnnnnnnnnnnnnnnnnnnnnnnnnnnnnnnnnnnnnnnnnnnnnnnnnnnnnnnnnnnnnnnnnnnnnnnnnnnnnnnnnnnnnnnnnnnnnnnnnnnnnnnnnnnnnnnnnnnnnnnnnnnnnnnnnnnnnnnnnnnnnnnnnnnnnnnnnnnnnnnnnnnnnnnnnnnnnnnnnnnnnnnnnnnnnnnnnnnnnnnnnnnnnnnnnnnnnnnnnnnnnnnnnnnnnnnnnnnnnnnnnnnnnnnnnnnnnnnnnnnnnnnnnnnnnnnnnnnnnnnnnnnnnnnnnnnnnnnnnnnnnnnnnnnnnnnnnnnnnnnnnnnnnnnnnnnnnnnnnnnnnnnnnnnnnnnnnnnnnnnnnnnnnnnnnnnnnnnnnnnnnnnnnnnnnnnnnnnnnnnnnnnnnnnnnnnnnnnnnnnnnnnnttgactcaagcgcggcatccggtccatccccagtggtgtaagaccggacgcggcgacggtgcggggcggcgctggccctgaggtaggcggcggtaagaggggccgcccgcggcccccggctcactccggcactccgggccgctcggcctccatgcctgcccgaccgcgctgccggagccccaggtccgggggcggatgggagcgctgccgcgggggtgggcgggcggggcgcgggggccatgtgcgagcgcggcagggaggcgggcggggcgggctgcaggcggggtccgactctggggccagtccgggccacggttgggacccagtcgagggtcggactggtcagggttcaggcgggatccggcgtccgagtcctggtgggccggcctggggcaggatctggctctggctgcgggtcctgactcgggtcagggttgggcctccgatccagcccgctccggggcagggttcaatcccgcatttgccgaagtccctggggctggccggggtggaagacggggagggctctatgtctgggaaggggctctgaagaccacgtgggggcgctcgaaggggcctgggrccaccctcctctctgggtcaaaggtcatcgcaccggcaggggagaacttcctcctccttggctctccccacttacttcctgataacctggtagaggtctcccgcgggcggggagggggaggcgtagcaactttaggcaacttcccaaaggtgtgcgcaggttgggggcgggacgcggcgccccgggaggtggcggcctctgcgacagcgggagtataagagtggacctgcaggctggtcgcgaggaggtggagcggcgcccgccgtgtgcctgggaccggcatgctggggcaggagggcagccgcgtgtcaggtgtgaaaagctctggaggtgttttcatgagtccgtgcctgtgcgtgtggatgtggggagacctagtgagagtgtgtgtgatcatgagccttgactgagttcgtggatggggtgtgcgctccaggagaagtgtgtgagcacaagtgtgagcaggagtgagcacgggtttgggaaggccggtgcaagtgtgaaagccctcagcagagagcgagcctgcgtgggcttgtggggctcctgagcaccccggtgagtggagtgtgtgaactcggtgtgagcacgtccactggccttgggtctgctctccaatgcagaatacccagatgagggcagggtctcagaggtccccccaacatctggagaaaactgggaagtatcctgctcctggctagggattccaggtggggttgaaggttgcctgggggctacggttaccctgctccctggcctgggtgggagtaggggctttctaagcctcccccaggttcccaagggggagacctgctgtcagttactggccctgaagactctgtttccatggcaacagctaggagggggcagtgttcctgggcagtccttccttggactctgccccccttcttccccacttgctgggcttggaagcctggccctaggcccgaggttgggcaacccgtgtggcagggtgtctcccatcccccataccagtgctttcctgcgaacctaygggtctctccgtgcaggtgaccagcgccatgtccagccaggtggtgggcattgagcctctctacatcaaggcagagccggccagccctgacagtccaaagggttcctcggagacagagaccgagcctcctgtggccctggcccctggtccasctcccactcgctgcctcccaggccacaaggaagaggaggatggggagggggctgggcctggcgagcagggcggtgggaagctggtgctcagctccctgcccaagcgcctctgcctggtctgtggggacgtggcctccggctaccactatggtgtggcatcctgtgaggcctgcaaagccttcttcaagaggaccatccagggtgagcccccagcccactcccctgtcctttgccctgcaccctctgggtacactgctgggtgcaataggccccctgatggctgtggcaccgcttgaggctaacaatctggtgtttccagtccctctacctcccagagacactctttccctgagaagtatggtaaaagcaccgggtgtgctgatgcattgcagtggatgtgagtgagttcagggtaccacctgggtactctaggcccagcaccttctacagtggctctgaaagagtccaaggcagcctctgtctgttcctaagctttgttcttgtttctggcagcttctgacctctccccagcatagaacatgtcccctttttgttawttttccmaaagcagcaccaacacaaggcagattttaatttttttttttttgagacagagtctcactctgttgttcaggctagagtgcagtggcacaatctctgctcactgcaacctttgcccctgggttcaagagattctcctgcctcagcctcctgagtagctgagactgcaggtgtgcaccaccacgcccagctaatttttgtatttttagtagagacgacgtttcaccatgtcggccaggctggtctggaattcctgaccacaaatgatccacctgcctcggcctcccaaaacaaggcagatttttatcagtacttgagaggggctacatcatagtttagcacccaactttaaaaagactaacaggcaaggccggacacagttgctcacacctgtaatcccagcactttgggaggccaaggtgggcggatcacctgaggtcaggagatcgagaccagcctggccagggtggtgaaaccgcatctctactaaaaatgcaaaaaattagctgggcatggtggctcgcgcctgtaatctcagctacttgctacttgagaggctgaggcaggagaattgcttgaacccaggaggcagaggttgcagtgagccaagatcacaccactgtactccagcctgggtgacagagcgagattccatctcaaaaaaaaaaaaaaaaggccgggcactgtggctcatgtaatcccagcactttgggaggccgaggcgggcggatcatgaggtcaggagattgagaacatcctggctaacacggtgaaacactgtctctactaaaaatacaaaaaattagctgggcatggtggcgggcgcctgtaatcccagctacttgggaggctgaggcaggagaatggcgtgaacccaggaggcggaggttgcagtgagccaagatcacgccactgcactccagcctgggcgacagagtgagactccgtctcaaaaaaaaaaaaaaaaaggctgggcgcggtggctcatgcctgtaatcccagcactttgggaggccgagacgggcggatcacctgaggtcaggagtttgagaccagcctgaccaatgtgatgaaaccccgtctctactgaaaatacaaaaattagccaagcatggtggcatgcgcctgtcatcccactcaagaggctgagacaggagaattgcttgaacctgggaggcagaggttgcaatgagcccagatcgcgccattgcactctagcctgcgcaacaaaagtgaaactccacctcaaaaaacaaaaacaaaaacaaaaacaaaaaaacccaaaaacgctgggcttggtggctcatggcctgtaatcccagcactttgggaggctgaggcagacggatcacgaggtcaggagttcgagaccagcctggccaacatggtaaaaccccgtctctactaaaaatacaaaaattagccgggcgtggtggtgagtgcctgtaatcccactacttgggaggctgaggcaggagaattgcttgaacccgggaggcagaggttgcagtgagctgagatcatgccacagcactctagtctgggcaacagaatgagacactctcatctcaaaaaaaaaaaaaaaaaggacttacaggcatgtctgctcttaaaagtcactaatttttttctcactcaggaaagcttatcagaatttgggggaatgagcaagatgctgacattaagcattgcctgggaagggcctattatttccgttatttctgcttttatgtaaccattggttactttgggggctataacacgtataattaaaaaaaaaaaaaaaaaggccaagtgtggtggctcacacctgtaatctcagcactttcggaggctaagatgggaggatcacaaggtcaggagttcgagaccagcctggccaacatggtgaaaccctgtctgtactagaaatacaaaaattagccaggtgtcgtggtgggtgcctgtagtcccagctactcaggaggctgaggcaggagaattgctggaacccaggaggcagaggttggagttagccaagatcgtgccactgcactcccagcctgggtgacagagtgagagttcgtatcaaaaaaaaaaaaaaaaaaaaaatcttgagtgcttaccttgtgctaggcactgtattcttttatgatctcagttagtccccacagcaaccctataaggtgtcagtactgttataactgaaactaagagaggcatttgaaactttgttgaagtctcacaactaggaaatggcagaaccaagatttgaacttgggtcagtataggtccagagctgagctcttcaatgttagactgcttcctctgcttattactaataacaccgaactttggacagacgctgaatgactgattgtgacattccagcacgtttttttttttttttttgagacagtctcgtgtggtcgcccaggctggagtgcagtggcacgatctcggctcactgcaagctccgcctcccgggttcacaccattctcctgcctcagcctcctgagtagctgggactacaggtgcccgccaccacgcctggctaattttttgtacttttagtagagacggggtttcagcgtgttagccaagatggtcttgatttcctgacctcgagatccacctgccttggactcccaaagtgctgggattacaggcgtgagccactgctcctggccaggttttttttttttttttttttttttttgagatggagttttgctcttgttgtccaggctggagtgcaacggcctgcagtcgtggttcactgcaacctctgcctcccgggttcaagccattcacctgcctcagcctcccaagtagctgggattacaggcgcctgccaccatgcccggctaatttttgtgtttttagtagggatggggtttcaccatgttggccaggctggcctcaaactcctgacctcaggcgatctgccctcctcgggcttccaaagtgctgggattataggtgtgagccactgcaccccgccaatccagcaagttttaacttggccaaaatccaccaatcttaaactttgtgcacccttcccrctctgaagaacagtgagccagccggccagggtgcgggtatctcctacctaccctggggcccctcactgtatgttgactattgacaaatatttattgtgtgctggctgtgaataggacttgtatattgagcacttaggtgtcatgaaccatgctggatgttttgaccatattatcccctttaattctcacgacccaactctgtggggcacttttacagctgggaaactgagggttcaaggggttaggtatgggacttgcccaaggtcataaaggtatgtggtagccagagtccctgttcggcacagacctgttctttgctgtcctgrccagtgttccaggccttggggacatagctggggctgaagcagggctgtttctgccctcaggcagtttacatcctggcagaggggagagctgggcaacagtgagttgcacagacttgtcttattaccgctgtggtatgtgcaggaaggggaggtgctggttctgaggctccagagggcttgtcttttttttttttttttgagacggagtctcgctttgttgcccaggctagagtccrgtggcgcgatctcggctcagtgcaagctccgcctcccgggttcaagcgattctcctgcctcagcctccccaatagctgggattacaggcgcatggcaccacgcacggctaattttggtatttttagtagagactgggtttcaccatgttagccaggatggtctcgatctcctgacctcgtgatccacccgcctcggcctcccaaagtgctgggattacgctcccggcctctttttttttttagacagagtctcactctgttgccaggctatagtacagtggcacgatctcagcttactgcaacctccgcctcccaggttcaagcgattgttctccctcagcctcccgagtagctgggactacaggcacacgcccagctaatttttgtatttttagtagagacagggtttcaccgtgttggtcaggctggtctcaaactcctcacctcgtgatctgcctgcctcggcctcccaaagtgctgggattataggcgtgagccactgcgcctggcctttttttttttttttttttttttttggtacagagtttcgctctggttgcccaggctggagtgcaatggcacgatcttggctcactgcagcctctgcctcccgggttcaagcgattctcctgcctcagcctccggagcagctgggattacagacatgcaccaccatgyccggctaatttttttttttcgagatggagtctcactgtgtcacccaggctggagtgcagtggcacaatctcggctcactgcaacctctgcctcccgggttcaagcgattctcctgcctcagcctcctgagtagctgggactacaggtgcctgccaccacacccagctaatttttgtacttttagtagagacggggttttaccatgttggccaggctggtcttgaacttctgacctcaggtgatccacccacctcggtctcccaaagtgctgggattacaggcgtgagccaccgtgcccggccgtggtgtcttgagctgagtgcagaagcgcaaatagggggtaggagaaaatgcaccgcgaggagaaatgtgctgcgggcctgctgtctagctgtgtcatttggtcgttgcggggccctgtgaggccgggagggctgccagcacccaccatgtgccaggcctcgttgctagtgctggggccagttcctgccccggtggagctgccactgaagggggaggcgtaataaacaagataggtgagtgcatatgcagcgtggtctgttgtgctgagggctgaagagaaaccagaagcagggctcagaggccaggaggactctgcaaagggatttggcattatcacagggtggccagggaagatcttcaaggtgacagtgagcagagggaggtgagggagcctgtgtggacttcaggactagagctccaggcagggcctgtttgaggaacatggaggaggcgagagcaaggagtagaggtcaaaaggaggcaagaagcaggggcgtaggcctaggaggacrtaggttcgctttggcttggactcagagaagggaaatccccagagggttttgagaagaggaggtacaggatgtaatggaggcttaataggaccctcttggctgctgagtcgagaacagactggagcaagcagggacagccaagcgaggggcgaggtgacagtgactatcaggtcaagggtggaagtagttgccaggggcaggaggcggattctggaccttggaggaggtaaagcccaccagaatgtgtcggtggcttggatgtggggtgtgagaggaaccagagattctgcctaggtttcttcttgggcaagtgaacacgtggagtccacgtaggctgtgttcggtccgagatgccttctagacatgcaggatgtcaaggaggcagctggagagatgggtctggagctcacagcaagtccaggctagaggtagaaacgtgagagccccacggctggggaagattgccatgggattggagatgagctccaaggacagccctggcagtctggatggaagagcttgggaagatgctcagaaaccacaaagtggctggtgcggtgggaggaaaaccagagtgtatgctgtcctagaagcaaaagaagaaagtgtttcagtgtttctaggagcaggaagtgatcaacagccttagatcctccttttaggccaagtaacatgaggactaagaattgaccactggatttagcaatgcagaggtccttgtggcccttgatgtcggcagatgagggcagtgtggtccagagatgaggcttggggctgagatgcagccccgctgcctggtccagctcctccctcatccaggcagggctcccccgcccagcagccactcccctccctgcctgctcatggccccctgctctccctttcctccccatacccccagacctgtgcttgcccggggagagtcagggctctcctgtcagctgggtcccctcccagccccgggaggccgccactggagccctgcctcttcctggcagggagcatcgagtacagctgtccrgcctccaacgagtgtgagatcaccaagcggagacgcaaggcctgccaggcctgccgcttcaccaagtgcctgcgggtgggcatgctcaaggagggtgagcgctgggcaggggctgggcgagggctgggggagtcggggacccgggccaggtgggggtraggcctgggagttctggtgagtggactcggggaggacagctctggagagcaagccccaccctgcccacagcaccacagtcacagtcctatctgtcccacaattcaaggagtgcgcctggaccgcgtccggggtgggcggcagaagtacaagcggcggccggaggtggacccactgcccttcccgggccccttccctgctgggcccctggcagtcgctggaggcccccggaagacaggtgagagcaytgtgggtacctggggctacgaaaccggaggcctatgtgtggcatcatagttaccttgggcactgggacctgtatttccccttcgtctcttcactcactcatttccccaagacatgtgaaactgccttttcctgcatcaggaaaagtagtagaactgggaacagggacgattttccaacactcacagcctgtccacaaacacacgggctttccctgggagacagttagcgctcttccctggagggaagtcactggacagctgctactgaggaaggccacagggggagccactgtgggaagatgcttgacccctgaggcctgacagattcgagtgctcctgactcttgtcctctaattgtcacagcagccccagtgaatgcactggtgtctcatctgctggtggttgagcctgagaagctctatgccatgcctgaccccgcaggccctgatgggcacctcccagccgtggctaccctctgtgacctctttgaccgagagattgtggtcaccatcagctgggccaagagcatcccaggtaaagggcccaggtgacccgsggctgccctgaacgggcccrgctctggtgcgnttgctcagccaggcccgctccccgctgccccctaggcttctcatcgctgtcgctgtctgaccagatgtcagtactgcagagcgtgtggatggaggtgctggtgctgggtgtggcccagcgctcactgccactgcaggatgagctggccttcgctgaggacttagtcctggatgaagagggggcacgggcagctggcctgggggaactgggggctgccctgctgcaactagtgcggcggctgcaggccctgcggctggagcgagaggagtatgttctactaaaggccttggcccttgccaattcaggtgagtctggggcaggcactgacaggtgaggtgtctccgtaaggtcttcaggttaactcagtgayggtagcacagccccaytttgcagataacgaaaactgaggcttagggaagaacaatgacttgctagaagtcaaaaagcaagccaagtgcaggctccaaactgcacacaggattttgagccctagtgccacactaatgcagaaaggtcatttagtgggagggaaggtggggagggtacaaggtggccacagttgagggagagagggtggggtcctggcccacgagccgcagcaatgagtggtgcctctcagtcagccaatcaacaaatcctcgtttggctcttccttaggccccatccagcagtgctcaagatacggggagtgcccttgccagagatagcccaggccaacaccacattcctctcttcttgcagactctgtgcacatcgaagatgccgaggctgtggagcagctgcgagaagctctgcacgaggccctgctggagtatgaagccggccgggctggcccyggagggggtgctgagcggcggcgggcgggcaggctgctgctcacgctaccgctcctccgccagacagcgggcaaagtgctggcccatttctatggggtgaagctggagggcaaggtgcccatgcacaagctgttcttggagatgctcgaggccatgatggactgaggcaaggggtgggactggtgggggttctggcaggacctgcctagcatggggtcagccccaakggctggggcggagctggggtctgggcagtgccacagcctgctggcagggccagggcaatgccatcagcccctgggaacaggccccacgccctctcctccccctcctagggggtgtcagaagctgggaacgtgtgtccaggctctgggcacagtgctgccccttgcaagccataacgtgcccccagagtgtagggggccttgcggaagccatagggggctgcacgggatgcgtgggaggcagaaacctatctcagggagggaaggggatggaggccagagtctcccagtgggtgatgcttttgctgctgcttaatcctaccccctcttcaaagcagagtgggacttggagagcaaaggcccatgcccccttcgctcctcctctcatcatttgcattgggcattagtgtccccccttgaagcaataactccaagcagactccagcccctggacccctggggtggccagggcttccccatcagctcccaacgagcctcctcagggggtaggagagcactgcctytatgccctgcagagcaataacactatatttatttttgggtttggccagggaggcgcagggacatggggcaagccagggcccagagcccttgrctgtacagagactctattttaatgtatatttgctgcaaagagaaaccgcttttggttttaaacctttaatgagaaaaaaatatataataccgagctcaaaaacactgtgtttggtgtcattgggtcaagggttggggatacacacggcagaattcggaaacagggtatagatcaacaaaaatacacagtcataacaagaaaaactggcgcctggcacaatcaactctcagtttcctcttcactcagcagcatgttggggatcccgcggctgatggggaacatacgtccagattccgggcactgcagggtgccctctatcacttccacctgcgggcagggagggacagagctgagcactggcagcctcagtgcgggaggcaggtggcccgggaagcaagtgatgggccgcttctcacctccagcagcaggtggtgcatggtcctcagaaactcctcattctcctcatatccctcaaccggccctttcggcacctggatcagacgcaactgtgggcaagaggccaaaattatctccgggcatcccgaactcccgcctcagcccggctgaggtgtgcccgccccgcattccccgggatatgctggggcggggtaaggatcctcacgttatcggccgcctccaggaacgccgaccactccactttaggtatcatacgcgccacgaagttggggttgaattccacagggcagatacggacctcggtggcctgcagggcggaggagtttaggcaagcactggaccccggcccaccatcccgcccgaaaagggaagactgccgccggcgggtacctggaggcgcagggggaagccacgggaccccaccccccgcacatgcgagctcagcagattgtgggtaagcagtttcatgtcgccgmacaaactctcgccaggccggaaccggaaaaaggtcgtcctccgctgcctmacttccsgggatgctccwctcgatgctattggatagccaggagaaccggaagtggcgaacttgctggaacttctcgtgtttgtgggagctgmggtaggtaggtgaaagacctgtcgggtcacgcgccgctaccggaagcgtctcagcaggaggttcctacggcgcacgcccagcttttttttgccacaaattcttcgtaagatgcaaatcatatgcaaaatagctgcaatgcaggagctctygttgaatgcaaaataaacacattttactcctacacaggcgcctaacaccgtcgtcctctgtatcccactttcggttaaggggcagaaataccgccctatctgtaaattaggcccatggaagccgagccgcacctcattcctatatgcaaattagctgctccagtgccgaaagctccgccccatttgtagttgcgtcggctgtccagcacccagtgcaaacgaggcgtgggtcccggaagctctgttctgcgggtggccgctcgcgcctgcgcagtggaggcggcccaggcccgccttccgcagggtgtcgccgctgtgccgctagcggtgccccgcctgctgcggtggcaccagccaggaggcggagtggaagtggccgtggggcgggtatgggactagctggcgtgtgcgccctgagacgctcagcgggctatatactcgtcggtggggccggcggtcagtctgcggcagcggcagcaagacggtrcagtgaaggagagtgggcgtctggcggggtccgcagtttcagcagagccgctgcagccatggccccaatcaaggtgaccgctggcccggccgggcctgacatcccccactacccccatggcaatccccgtcccgctagtctgagagtatcgccttatttcctgcctgccagacccctcccckccgcccgcccggctcatcccttcagaaggccctcgtggctgcccacctttctcgccaatcgtgggggcctcacctcccgggacagtcccgaggcattgtgttttttgttttttgtttttttttgagacggagtctttctgtgtcgcccaggctggagtgcagtgacgcaatctctgctcactgcagcctccgcctcccgggttcaagcgattctactgcctcagcctcctgagtagctgggactacagatgcgagccaccacgcccagctattgtatttttagtagagacgggatttcaccccgttgttcagattggtctcgaactcctgacctcaggtgaaccccccccgcccccccccgcctcggcttcccgaagtgctaggattacaggtgtgagacaccactcccggcctgatttcccctatcttctgaaacagctgtcccttagcgcccccgcgggggcttaccccatcccactccatgacctcccctccccccatggcgaattcccacctttctgtctttcactcacttcctggaaccgtccccagggccttggaccttcccccttctcctcccaaaccttgtgagaccccattccctttctacttcatcctgctctcaacctttgggctcctcagaggccctcacctctgactctctctccctacccactctggtcccatgaagccctcaagtactctggggatggatccttcccccttcaaaagattccttcttttgttctacacctcctgggtgtaggggcctggacaccctcccccaacgttccacctgccgctgcccttcctcttcctcctcctgagggtgggaccctcagacctggccaagatcctctccctccatgttgtcagggactcctcctcacccccaaatacagccctctagcccctgtccattttattccactcctttcctgtaacctagacagcatgttatgcaaccctttgcgacacatggggaaaccttccctccctttctctgttgtcaccaatggccccttaagaggagcagggccaccttgaaacttggaggatatggggtaacccagtgggagcgggcagggagggcccttggaaactgacagggctggagtatcctgctgggtttcagccccggttcctgcaggcacagctgccaggctctctgttcaccttcctgcctctggtttgccccggctccctcaccccccttaccctggagtccttccttctaggtgggagatgccatcccagcagtggaggtgtttgaaggggagccagggaacaaggtgaacctggcagagctgttcaagggcaagaagggtgtgctgtttggagttcctggggccttcacccctggatgttccaaggtgaggcccttccccttctgaagatcaggacctgggatcttttgtgttgctcttaagtcctccacatagtcctgataggactcctaaaaagcatttcagtgccatcacaaaacaagtagagctgggtagagctgggcgcggtggctcacgcctgtaatcccagcactttgggaggccaaggcgggtggatcacgaggtcaggagttcaaaaccagtctggccaagatggtgaaaccctgtctctactaaaaatgcaaaaaaatcagccggacatggtggcgggcgcctgtaatcccaggtactggggaggctgaggcagagaattgcttgaacccaggaggcgtaggttgcagtgagtggagatcgtgcctctgcagtccagcctgggtgaaagagcgagactccgtctcaaaatgaaaaaaaaaaaaaagaaaacaagtagagactgcaaaaagggaacagtaccaggaatgttggagaaaaacatactacaattaaatccaacacccctgttggtcctgctaaatgacaggcactgtggaaggtgcttgggactcagataaataagacatagatctgcccatggaaagttcacgtctggaccataaggcattaggtttcattctgagcttcctagtggccaaggcaaaaaggaaatagaatggtttagacagctctcattgtctgatcaaaggtgttgaggcagagcactgaggagggcctggagataaagggtgggctgggggtcagatgcagttatccctttgccgaccctttgttccccttcctcagacacacctgccagggtttgtggagcaggctgaggctctgaaggccaagggagtccaggtggtggcctgtctgagtgttaatgatgcctttgtgactggcgagtggggccgagcccacaaggcggaaggcaaggtgaggtgaggggcctgcagggagtcaggaccaggtaggatattcttcttgtgacctttactttctctgcaggttcggctcctggctgatcccactggggcctttgggaaggtgagtgttcccctgaccgccacagggacatggcagtgcggggagcagtgggggcccttrgcctcttcaaggatttctgacacttttctctgtctcttcttaggagacagacttattactagatgattcgctggtgtccatctttgggaatcgacgtctcaagaggtaaaagtggagagtcctctgtggagagagtcctctgtgggagagagtcctctgtgggagagagtcctctgtggagagggtcctctgtgggaagagtcgtctgtgggggagagtcctctgtgtgggagagtcgtctgtggggagagtcctgtgtggggagagtcctctgtggagagagtcctctgtgggggagagtcctgtgtgggggagagtcctctgtggggagagtcctctgtgtggagagagtcctgtgtgggagagagtcctgtgtggggagagtcttctgtaggggagagtcctctggggagagagtcctgtgtgggggagagttctctgtggggagagtcctctgtgtggagagagtcctgtgtggtggtgagtcctctgtgggggagagtcctctgtggggggagtcctctctggagttctcttgggcccctggctgttcactgcctgtctccatgcccagcctccaagcccaggctgatgcagctggctgggcccctctttccggcaggttctccatggtggtacaggatggcatagtgaaggccctgaatgtggaaccaratggcacaggcctcacctgcagcctggcacccaatatcatctcacagctytgaggccctgggccagattacttcctccacccctccctatytcacctgcccagccstgtgctggggccctgcaattggaatgttggccagatttctgcaataaacacttgtggtttgcggccatctccttggttatgaatggctgtttcgctgagcgccaggcattctggcatcatcacagactgggtgagaatggtgagggcgcagatgggctgaaagggagaatgtagggggtcctgcttaattaagggggagctagggagggcctttcaagggaagttttttttttttttttttttgagacagtttcactctgtcccctaggctggagtgcagtggcatgatctcggctcaccacaacctctgcctcccaggttcaagcgattttcctgcctcagactccccagtagatgggattacaggtgtctgccaccacgcccgactaagtttttgtatttttggtagagacggggtttcaccatgttggccaggctggtctcgaactcctgacctcaggtgatcacccgcctccacctcccaaagtgctgggattacaggtgtgagccactgtgcccagccttgaggcaggtgttactgagcactgagaaggagccagcaatctgaagaggaagggaagaagcgctccccacagaggcagcacagagggcgaggcctggccgatggcatgtggcgcacagtgtggcctttgtacctgctctctgggtgctgcctgatgccatttagtctggaaaccccatggcgggaagcttggctcccagcattcctgccggggcccagccccaccatcctttcagacttgaccccctcctgggcacaccctcatcccaggaagagctcaggtcactttaggaccatctgatggacagggagaggggctctggcacagcacttgctcattccaggagggctccctgggggaagagtctaggtgagctgtggaggggagaagatgctggtgaggcctgaccagtggtggctgggtgtgaggggcctcaagtggggacaccagcagggtgtggggatgggggccattgccacggcaggccctgctcctgggcctctgccccttggtgcagggaagccacgcctgtgatggtgaggccccactgcgtggagtctagggggcctctgtgccctgcgcgatgctgcctgcctgcccaccccaggtgtggtaacagccctcacaagaattggtgaggtgtggactgctgctgcctctcagccacctacagggagtccgcattccatcaccgcgtggagctgccctgccatgaaccacatcaatacctggctcccaggcacttcctgcgtagtggtccccaggggtcagcccccactgctgactcaggcaggccacactcttgagaggtcagggagaaggtcaaagcagggcctcatagagcaaatgacccttgaggcagtgggagtggcgcctcaagtgggaggcggagggaggcccatagccctaggggtgagccccatagccctaggggtggagggtgggacaatcccatgctgccgcagcaaggtgggtagcaggagtagggggggaatgttggggacaagagaggatgcctggaggtcagtgggctctctgaagctgatgagcagcttgccttccaccctacaggcaccttggccatgggctaccgtgtgcagcccccaagctgggaggctgggagaggcaccagatgggcagcagggagcaggacccatgatgacagcaatgcccaggaggtggaggtggagatgtgttgggagggagggtgcatccagggagctgcttgctgaaggtggaggggctgggtgcttgtggtcacgtctgtgagaacagacactcagtaggaggggagccagcctccctgcccagggttgcaggtgctcagcctacccgagtcgtgctgcccaccaacctctgtcactgtggttctctcccacaacctgccaccccttcaggggtcccaggtgggggcagggaaggaggctgactgcacctcgagctgccctggtaaactgcctgcctctcctctcctgccaaactcgggggtacagtgttgtcctcatggacacgcataacacaaagcccctttctttcccggataccacctctttatcctctcatcatacaaatgagaaaacagacgtggagcttcctacagggcacctgtgagctaatgagtgtctccattagtaaatagggggtggtggtagcaaatagcccaccccactggctgtgcaccccacgctacccaggcagctccctgctatcggggaagcccagctccgtctctgtcactctgctgcctgtttcctctgctcctgggctattatctgggctggctgaggccaagcaaggcctctagaggaagtgtcccctccaaggtctgttgccactggctgggcctctaggaagggttgagagggcttccagggctggggtggccctctaggacagcctggtgtgggtggcggtggggctgtggcctcagtggccctgactgctgagcatgtggctgagcttgctggagtgaggacgtccttgggtgggggcacggaggactggccctggaagctgctccaggccctggagggcccaagattaaacagcacctggcaagagaaccttgcatagctgtctccaggttggacaggtggggcttcaggcctggagataagggcagaccaggccacggtgtcctggaccagagagccctggacatctgggctgcacctggcagagctgtgcgtgtggccttcctgggctcttggtggccgaaagaccaatgttaaaaaacataacaggccaggcggggtggcttacacctgtaatcccagcaccgtgggaggccaaggcgggtggatcattttaggtcaggagtttgagactagcctggccaacatggagaaatcccatatctactaaaaatacaaaaattacttgggcatggtggcgcatgtctgtaatcccggctactggggagggaggctgaggcaggagaattgcttgaacctgggaggtggaggttgcagtgagccgagatcgtgccactgcatgccagcctgggagacagagcaggagtctgtctcaaaaaaaaaaaaaaaaaaaaaaaaaagaaaagaagctgaaacatccacccaacaacacatgccccagtgaaactcacttgcctgtcctagcatgcccaaggccatagcaactgagaccagaaggccaagggtgttactcagcatcagtggttctgggccttcctgggtctagagtccctttgaaacgcagctgaacagaccccaacatgagcctgaagagtgttgacctaaaaggaagaagcctaggcaaaattaatatcagcggagactttatttgggccaagcttgaggattgcatcccaggagcacagattcaagttgccctgaatatacactccgattagcagaagttgaaatggattttaaaaggacaagagagctcctgagttgtttactaagaatttacattaaaataacaaactggctggctgcagtggctcaggcctgtaatcccggttcctctggcagctgaggtggaagcattgattcaggccagtttgagaccagcttggacaacatagcaagacaccgtccctacaaaataaataaataaataaataagtaaatatataaataagttgtcgtagtgcatgcctgtggtcgtagctactcaggaggctgaggcgggaggatcgcttgacaccaggagttggtgactaactacagttagtgagctataatcgtgccactaccctccagcctgggtgacagagcgagaccttgtctctaaaaaaataaaaataggccgggtgtggtggctcacacctataatcccagcactttgggaggctgaggtgggcggatcacctgaggtcgggagttcgagaccagcctaaccaacatggagaaaccccgtctctactaaaaatacaaaattagccaggtgtggtggctcatgcctgtaatcccagctactcgggcggctgaggcagaagaatcacttgaacctgggaggcggaggttttggtgagccaagatctcaccactgcactccagcctgggcaacaagagccaaactctgtctcaaaaaaaaaaaaacccaaaacaaaaacaactaaataaaaataaattagtgacaccccgtctctaccaaaaaaataaaataattgggtgggtgtggtagcacgtgcctatagttcgagctactccagaggctgagttgggaaaatcacttgagcccaggaggccaagactgcagtgagttatgattatgccactgcactccagcctgggtaatagagcaagaccctgcctcaaaaaaaaaaaaaaaaaaaaaaggctcaataaaaggttatttgaaagataaaaatcaggccaggcatggtggctcacgcctgtaatcctagcactttgggaggctgaggtgggcggatcacctgaggtcaggagtttgagaccagcctggccaacatggtgaaaccccatctctactaaaaatacaaaattagccaggcatggtggtgccatgcctgtagtcccagctacttgggaggctgagacaggagaattacttgaacctgggaggcagaggttgcagtgagtcgagatcacgccattgcactccaacctgggcaacagaatgagtctcaccacaacctccgcttcccgggttcaagcgattcttgtgcctcagcctcctgagtaactgggactacaggcgcgtgccaccatgcccggctactttttgtattttttagtagagatggggtttcattatgttggccaggctggtcttgaactcctggcctcgtgatctgcccgcctcagcctcacaaagtgctgggattatacgtgtgagccaccgcgcctggcctatcgggggagttttcaataggccctaagggagtcaagtctgggtttctgagacaaagaaaaggttggaggggtcctggtgttcctggcctagatcaggcttgggctgcagccatgaaggtgctgtgatcaggggcagtggaggctgctggccccaaagggacacactctactgggcgtggttggggtttggtgacacaggcattgagaagtgacagcagatagtgcaaagtgtgcatgggtataacttctggagaagttcaggtaacatctatgcgaaggcacagattcttggtgttaacgagcatgcatattggcctgccatgtgattatatttgtatcatcaactcgcactcctggagttgggaatcatgtctttttacttaacacaggtaaggagccctgctcagggtgggaaacacagataatacttaacacgttttgggaaggagtaaagaagtgaaggccaggcgtggtagctcacgcctgtaatcccagcactttgggaggcagaggtgagcggatcacctgaggtccggagttcgagcccagcctgaccaacatggagaaaccccgtctctactaaaaatacaaaattagcagggcgtggtggtgcatgcttgtaatcccagctactcaggaggctgaggcaggagaatcgcttgaacctgggaggtggagattgcagtgagccgagattgtgccattgtctgggcaacaagagcaaaactccatctcaaaacaaaacaacacaacaacaacaaaaaaacaaaggcttagctcacaggtatgcactagagaggttgagctagtatgctagctgtgtgattattccttctgtcttgctgctctgccattttaaacacgtctttaccttatgatccactgtggctgcttgagttccagccatcacattcatcgtccagcctgcaggaaggaggaaatgaagaacagaagataaaaggcccatgccagctgtctgtcaagaagctttttctggaagctgtcatatatcccttccacttacatctcactggacagaacttagtcacatggtcatactagctgcaaaggaagctgagaagtatcaacttcattccagggtgccatgtgtctaaattaaaaattatgagtttttttagtcagggagagagagagaaaggatattgggtggacagcaagcagtgtggccacacagggatcacc

SEQ ID NO: 94649 - DNA, 48046 bp, Homo sapiens
gggttcacgccattctcctgcctcagcctcccgagtagctgggactacaggcacccgccaccacacccggctaattttttgtatttttagtagagacagggtttcaccgtgttagccaggatggtctcgatctcctaacttcgtgatccgcccgcctcggcctcccaaagtgctgggattacaggcgtgagccaccgcacccgggcgagttgtaagaattctttatatgttctggatactagacacttctcaaatatatgatttgcaaatattttctcccattctgtggattgtcttctcactttcttgatagtaatctttgatgcacaaaactttttaatacattatcttttaaaagaaagtaaatgtttattatgattaaagtgacacattttctttctttctttccttttcttttctttctttctttttttttttttttttttttttgagatggagtcttgctgtgtcacccaggccagagtgcaatggtgcaatcttggctcactgcaacctccacctcccaggttcaagcgattctccccagcctcagcctcctgagtagctgggattacaggcgactgccactgtgcccggctaatttttgtatttttagtagagacgagatttcaccatgttgacaagacttgtctcaaactcctgacctcgtgatttacccacctcggcctcccaaagtgctgggattacaggcatgaaccaccgcgcctggcctgacacattttcttacacccattagttaaaggagaaaatcattcccttgcggggttgggtacaattcagcagtcattcctaataaactctctaagtaaaatagaactagataaaaaaacaacaccctgactatgctatgcattcctttttttttgtttttgtttttttttttgagacagagtttcactctgttgcccaggctagagtgcagtggtatgatctcagctcactgcaacctccgcctcctgggctcaagcaattctcctgcctcagcctcccaagtagctgagactacaggcgcctgccaccataccctgctaatttttgtatttttagtagagacagggtttcgccatgtcggccaagctgctcttgaactcctgacctcaggtgatctgcccaccttggcctcccaaagtgctaggattacaggtgtgagccattctttttttttttttgagatggagttttcgctcttgctgcccaggctggagtccaatggtgcaatctcagctcactgcaacctccgcctcccagtttcaagcgattctcctgcctcagcctctcaagtagctgggattacaggcgcctgccaccacgcccggctaattttttgtattttttagcagaaacggggtttcaccatgttggccaggctggtcttgaactgctgacctcgtgatccactcgcctcaacctcccaaagtgcagattatgcattcttaacacaacccaataacacccatcacaccgaaggaggccatgctgaagccagtgccatcagcaacaggaagaaggcaaggatgcctactgtgattcaacaatgattccaaggtttggttcaatgcaccaagacaggaaaataaaatgattagtatcaatatttgagaagaagggaaaaatattttttattagaaaatgttattataatctaggaaatctgagactctcctaaaacattaatattattaagagaatttggtcaaagtgactggttgcaagaaatatgtccaaggctgggagttgtggctcacacctgtaatcccagcactttgggaggctgaggcgagtggattgtttgcggctagcagttccagatccatctgggcaacatggtgaaaccctgaatctacagaaaattcaaaaattagccgggcatagtggcgtacacctatagttccagctacctgggaggctgaggtggaaggcttgagtgactgtaatcacaccactgcactccagcctggtcaacagagtgagatcttgtctaaaaaaaaaaaaaaaatttacaatccaaaagccagtaactttcctttaactggcaatgacaaaacaaaaaacaatacgggagaaacattacattcataaaagcaacagaagatattgtgtcaataaattgaacaaaaacagggtctatatgggaaaaactataaaattggattgatagacaaagacaaaaagcctaaaaaaatgaagagatataccaggatcctgtttggaatgcttaaagtattcatttctcctaaatatataaaaatatttaagtccttcctatcagaatggagggggataggatatactgtataaaatgactttaaaagtttaaaatggtttcctaaaaactaggccaggcacagtgactcacacctgtaatcccagcactttgggaggccaaggcaagaggattgcttgagcccaggagttccagacaagcctgggcaacacagcaagaccttgtctctattaaaaaacaaaaatattagccaggtgtgcgtggtggtgtaatcccagcactctgggaggccgagactggtggatcacctgaggtcaggagcttgagaccagcctggccaacatggtgaaaccccatccctactaaaaatacaaaactagctgggtgtggtgatgggcgcttgcagtcccagctactcgggaggctgaggcatgagaatcgcttcaatctgggaggcggaggttgcagtgagccgagatcgctccactgcactccagcctgggcaacagaatgagacactgtctcaaaaacaaaaacaaaaacaaaaacaaaaacaaaaaaacagccaggtgtggtggtgcgtgcctgtagtccccgctacttaggagactgaggtggggggatggcttgaacccaggagattgaggctgcagggagcttgatcacaccactgcattccagcctgggcaacaaagtaagatcctgtccccccccaaaaaaaatagtaaaatgcttcaacagttttgggaagttactgtaaagctacctggggcaaacactactaagtgcttacctagtattaactcctttcttagtaacaaaatttgtatattgatggggtagcaatgtgtttcctcaataatattacaatataacttttaaacctataaggaggctttcccagcctcctttaaaggtatggctatgtggctaaagtataagcaaaagtggttgggaaggacttctagaaagactcctcttcaaaaatggatagacaacggtttgcaaaagtcatttttttgtttcttttttcccttttcatttcatttctcttttcactctcttttcttgctttatgtttttaaaattttatttgccctttcttcttcctactttccgctacctggaatggaatgtgaatctgatggctggaattccagaagccatcttggacaatgaggtgactgtaaggatggagattaattcgaggacagtggagtggaacgatggaggcctgatgaacgtgaagccaccattttagccctgggctacctatctctgaaattattttatctgacgagagaaataaacttctattttgtctcagctactattgttttaggacttggctatgtcacagatctaaaacccacttgatttactcctgcaatcaaaatatattgacacagaaaagacaacaaataaatcagtggaataaaacagaaaatccagaaacagattcaagtgtttatggggacttgatacatgaaagatcacaattcaagtcagttgaagaatgttttatttactaagtataactgctgacatgctggctgtttgtcaggaataaaacaaagctaaatccttcctcacatcacaaataagattaattctaggtggattagcgaactaaaggcaaaacgtaagtaaaattaataaaacaaaaattggaagaatatttgcrtaagcttaggtcgaggagaccttattaaacaaagcaggaaacctaaaacccatacaggaaaagaattgcacagtgttgtgtggtagaaaaaaaaacccacaaagttaaaagacaggttgggaaaaatatgtatgtaacacatttgatatccattggttattgctgatggtgggaaactgcaaacattttccgtaaagagccagagagtaaatatttgaggcttaagggtgtgaaccccaaaagaggttcatgatggatccggagtggctaactaggcctaaattcaaaatacagccaagcagccattggctgactagaggtcacacatacttcggtttttgtttgcttttttttttttttaggcggagtctcgctctgttgcccagactgtagtgcagtggcacaatctcgacttactgcaagctccgcctcccgggttcacgccgttctcctgcctcagcctcccaagtagctgggactacaggtgctcgccaccacgctaggctttcttttttttttcttttttttttttttagtagagacggggtttcaccgtgttagccaggatggtctcgatctcctgacctcgtgatcctcccgcctcgacctcccaaagtgctgggattacaggcgtgagccaccgcacccggcctttgtttgctttttgagacacgatcttgctctgtcgcccaggctggagtgcagtgaggcgatcatgactcacttcagcctcgacctcccgaactcaagcgctcctccagcctcagcccccagagtggctgagatcacaagaacccgccaccaccgcccgctaattttttgtagagaaggggtttcgccacgttgcccaggccgatcttgaactcctgggctcaagttaagggaggagaccacccctcatattgtcttacgcccaatttctgcctccaaagaaagaaaaagtaaaactaaaaggcagaaatgaaatccacaagcagacagcccggcctcacaccctaggcttggtaaagatggacccctgacctaatcagttatgttatctatagattacagacactgtatagaaaagcactgtgaaaatccctatcctgttttgttctgatctaattactggtgcatgcagcccccagtcacgtaccccctgcttgttcaattgatcacgaccctctcaggcgcacccccttagagttgtgagcccttaaaagggacaggaattgctcattcggggagctcggctggtgagacaggagtcttgccgatgaccccagccgaataaaccccttccttctttaactcgggtgtctgaggagttttgtctgtggctcgtcctgctacaaagtgatccgcctgcctcggcctcccaaatgctgggattacaggcgtgagtgaccgcacctggcctgggatggacattttaaaggttcctgatacatattgctaaattgttttctcgaaacgctctataccatcccaccagcattgtatgacgcctacggttgagatttttggctcaaagaattacggtgtatttcaaggggagaaccctcttctcatcttacccctaaactctatccttgagtgacctaccttcactcccaagcctccagtcacccactgggaatctctacctggaaatcccagaggcactcaaacttaacgtgtccaaaactaaattatccgtcaccttcccacctcatatccccccaaatgccccagattcagaaaacatacccatcactgtggctggcaccacggtgataagcacgataataaccatggcaaccagattccctactgaagccattcttttaggatgaaccaagggcacaacaggcagagatgacaaggggaatggagaagggggtacagtaagttttagatagtcgaaggcacgcgcacgacaacgcctgcgcaccacggaacagggcaaaagggtgacaaacatgcgccactgagttttatcgagcagccgatgcccagaaaacaggcatccgcacacagactcagtttccttgtaggcaactcccgggcgttgcgagtcacaaccggcattctcgcgccgtgagagagaactgcgcagctgctgactggcgggccgccaggcgcgtgcgtagagacgcccacacgcccgctgatgcgcacgcgccctgggccgcgcgtgcgcgcgtggggttccggaatgagccggggaaagcaargggaaggtttggggttggctcccggtttcgcgcatgcgtgcactgcacaaaccatttggcgggtttttccggccactcagttmtgccaccgtcactgagaagctcagcggtagcttttgggaagcaggacgttctcaccaggagagcgtcctctcgagatttctgctccctccattcagggcgtttgggagccaccccttcattttttaaaaaaagtatttctctgtgaccgacggccggggccttctgacggtctgaggtcttgcttgggccagtcacctcctgtcacggtccgcggaggggggaaggataagagggcgaggagctcatcgctcgccacccccgtgggcttcttgggcgcaggtcggagctgggtgggccggctccccggcccctggcttgggcgaccatgtccgcatccgcccagcagctggcggaggagctgcagatcttcggcctagactgcgaggaggctctaattgagaaatgtgagtcccgcacccctcccgccctgcagccgtgctccacgctctcgcccgagttcctcggcgcctagaaccgaaagtggagcgcttccaatttccacttcccctggagcagagttctcggtggctgtgagatgaagaatcaaacttgagttttgagatttaggatgtggggactttgaaatgcccaccgggtaccgcttggatgccaaatcaaaaataggaatatgcagcacgattttaaaccaactcgaagttcccgaaaggcggaattgggatgtgctagatagagactaggcactggtggcacctgagtttggaaattgttgaagccccggtaacaaagcaasagatgtgggggttttgaaatgtagctttttattcttggctcctccctttccagcctacaccttaaacctctgctgatccatcagttattttatcatagctgttggtggtctgtgcaaatatgaatcccttgaggtaggttcctaaaattgaatttgagctgtggaaggagctttagggagctttacagatggagaaacagacaaggaaagctaattgcctgagctgtctgtgaagccaggtgtcctgccttggagtcccgtgctgcatcatacgggtccatcgtgttggtcaagctgtagagcagtgtaaggagtcatttgaagcaaagcctgggagatgtggaagttctagaatcggtatgaatgtgcacctgccttaaccactcaacactttgaacttcttatatacaaaaagataacgaaacgttaatttatggtgagaaattcctttcagaaaccagaatacttcaagtcttcatgcccagtgccttctctctctctctttttttttttttttttttttgacagtcttgttttatcacccaggctggagtgcagtggtgcaatctcggctcacttcagcctccgcctcccaggttcaagcgattctcctgyctcagcctcccaagtagmtgggattacaggcgcccgccaccaggcccgamtaatttttttttgtacttttagtagagaaggggtttcaccatgtaggccagactgctctcgaactcctgacctcaagtgatccacccaccttggccttccaaagtgctgggattacaggcataagccagcaggctcggtccttctctttttaaaagaagactagccaggtgtggtggctcacgcctgtaatcccagcattttgggaggccaaggcaggtggataatctgaagtcgagaatttgagaccagcctgaccaacatggagaaaccctgtctctactaaaaatacaaaattagtcgggcgtggtggcgcatgcctgtaatcccagctactcaggaggctgaggcggaagaatcgcttgaacatgagaggcagaggttgtggtgagccgagatcacaccattgcactctagcctgggcaacaggagcgagactctgtctcaaaaaaaaaaaaaagacttaagtggaaaacctgatcatagtcagaaatgtatgtggtaagcatgaaatcagcatgagagaaattagttatgtgaaccagatttgtaaaggcttcaggccaagatgccagttgctttcatctcatggcaatggctttggaattgtggactttggatcatcagtaacttcagtggcaccttaatgtttcctgacagtcaaccgtatttccctgttttttttgttgttgtttgttttgttttttgagatggagtttctcattgcccaggctggagtgcaatggtgcaatcttggctcactgcaacctctgcctcccgagttcaagcggttctcctgcctcagcctcccgagtagctgggattacaggctcccgccaccacgcccggctaattttttgtatttttagtagagatggggtttcgccatgttgggcaggctgatctcgaacccctgacctccagtgatcctcccacctcggcctcccaaagtgctgggattataggtgtgagccaccacacctgttctactttttgtattttcagtagagacaaggtttcaccatgttggccaggctggtcttcaactcctgacctcaggtgatccgcccaccctggcctcccaaagtgctgggattacactgcgccaggcccctggtctctttactctgagtcttccagatgattgttttccaccttctcctgtaacatccttctgtcccaccctcactctcagctgacaaatttctattatttgctgaaaaatgtagaagcattagaaaacttcgatcagctaccaccattatgtctcactgacccatatctgkggcatatacctagccttctttcctattataatgaataagctttccgtattcctagcaaaatccaagtcctccacttgagtcctaaaccccattccttctgaagcaattaaggacatcactggtaattctcctgtcttacatattttctattttccttgctacaagatttttttcctactagtatagaaatgtgcttccaatcttgcctttaaaatactctgttgaccctacttcccactccagttctctccttcccaattacagcagacctcaaaagggtcggccgggtgcggtggctcacgcctgtaatccgagcactttgggaggcggaggagggcggatcacaaggtcaagagatggagaccatcctggccaacgtggtgaaacccggtctctacttaaaatacaaaaattagctgggcatggtggcgcatgcctgtagtcccagctacttgggaggctgagacaggagaatcgcttgaatcggggaggtggaggttgcaatgagccgagatcgtgccactgcattccagcctggcaacagagtgcaactctgtctccaaaaaaaaaagggggggggccttgccatctttaaatatttcctccttaaatccatttcagtaagttcttttgttgccaccacttcaccaaagctgctctactcaaggtcaccagtgaccttcaccatgctaaaaccagtgatgaattttcagtcctcatcttgaattgaattagcaccggcacttgacactgtttgtcattttttctttttttaaacacatttttcttttagcttcttagacactactagtttttctttcttttttttctgagacagggtcttgctctgttgcccaggctggagtataatgggcaaatcacagctcactgcagcctcaacctccttggctcaagcaatccttccacctcagcccccaagtagctgtaactacaggcacatgccaccaagcccacctaattgttgtattttttatagaaacggtttcaccctgttgcccaagctggtctcaaacttctgggttcaaacagtctgcccacctcaacctcacaaaatactggattacaggcgtgagccactgcatccggcttactcctagtttttcttcagctttgcttgtgtcaccgcttctcaggctttgccgattcatcctcagaggccctaaggcgccccaagactcaagcctgggatcttttctcccttctagatacgctcactcccttggcgatctcacctggggtctcatagctttatatcccatgtatttactgatggttcccaaatttatacctccgcccacaacccttgcctgaactacaggctggtttgttcagcctgctgtctccagttggatgtctaaatggcacctcaaactctgcatgtctaaaactaagctcctggtatctcctctctctcctcagagtagttcctctggctcttttccccatctcagttaatagggacgccactcttcctgttgcacaggctaaaaatatcagcatcatccttgactttctttttctcataccttacattcagttagcagatcccactggcttcacttccagcatgtaaagtcctatccagagtccagccacttctcgccatctccactgccaccaccttgatccaagccaccatcatctctcacctgggcttttccatgattctttaattggtccccctgattctgcccttatcctcttttgtctccccysagtggtgagctttgtaaggacaaggatgcttctgttttctcattgcccaaaacagtgcctggcactaatagattctgaataaacattgatggagtaaaccaggattatttttgcttttctaggtgaaacttcgagaaatgaactaagtttttacttgtccaattttcctttctacagtggtagagctttgtgttcagtatggacagaatgaggagggaatggtaggcgagcttatagccttctgcaccagcacacataaagttggccttacctcagagatcctgaactcttttgagcatgaggtaagaacaaaatgaaagcaaactaataatgtgattctccatttctgctctacaggggaggcattgtgatatattgagaggagtgtgggctttcgagtcaggcctggattccagtcccagtgtgagcttggacaaactatgtccctgagcctcagtttccttttctgacattgggtctaataatctgtattttttatgattgttataagaattaaatggggctgggcgccgtggctcatgcccataatcccagaactttgggaggccgaggcaggcagatcacaaggtcaggagttcaagaccagcctggccaacgtggtgaaaccctgtctctactaaaaatacaaaaattagttgggcatggtggcaggcgcctgtaatcccaggtactcggaaagctgaggaaggagaatcgcttgaaccgaggaggtggaggttgcagtgagctgagattgcgccactgcactccagcctgggacagagcgagactccatctcaaaaaaaaaagaaatgagaatggacataaagcacttaaaactatgcccagcaggtgataagtcttcaccaaataattggtattattaggattgttatatgttatagacagtcatgggatgtctttgtttttagtctgtgtgtatcttaattctttgaggaatgttagatctttgattatattttgaataccttttattatctcaaggcttttgaaaacacctctgctattacttgactatgaagtactgtattcactatcttttctttttcagtttctgagcaaaagattatcgaaagccaggcatagtacctgcaaggacagtggccatgcaggagctagagacattgtttccattcaagagctgtatccttttctgctgaaggtctttgcaccaagctacatgttgtattttataatttgtctgtagtcgcatgtgtaatttaaaaacaaataataaggccgggcrcggtggctcargcctgtaatcccagcacttttggaggccgaggcaagcagatcacttgagcccaggaatttgtgaccaacctgggcaacatggtgaaaccctgtctctatcaaaagtacaaatttttttttttttttgagtkggagtttcgctctttttgcccaggctgaagtgcaatggtgcaatctcagctcactgcaacctctgcctcccaatctcaagtgattctcctgcctcagcctcctgagtagctgggattacaggtgcacaccaccacacctggataattttgtattttttttggtagagacagggtttcaccatgttggccagctggtctcgaactcctgacctcaggtgatccgcctgcctaggcctcccaaagtcctgggattacaggcgtgagtcaccgtgcccggccaaagtacaaattaaaaaataataataataagctgggtgtggtgatgtacgcctgtagatccagctagttggtaggctgaggtgagaaaatctcttgaacctgggatgtggaagttgcagtaatctgagatcaggccactgcactccatcctggacgacgaggaaaccccatctcaataataataatagtaaaaattgcctaatattgagatttcttctagcaatcagcccttgccttatatgaaagtttattattattattattwttttttttttttgagatggagtctcgctgtgtcgcccatgctggagtgcagtggtgtgatctcagctcactgcaagctccgtctcctgggttcatgccattctcctgcctcagcctcccgagtagctgggactacaggcgcccggctarttttttgtattttttttagtagagacggggtttcactgtgttagccaggatggtctctgtctcctgatctcgtgatccgcccatctcrgcctcccaaagtgctgggattacaggcatgagctaccgtgcccagccattattgtttttcttaaccagtgttcttagaattgaagtggaagaagaagaggaaatcctcttgaactcttacaccacaccttcaaaggtaagtaaacagtgtttggacattgcattttacaagtaacattttaaaatagtttcacaacatttgaagatctgagggaaaaaatcaaccactctcatgcatttcctactatatttccacttatacatcttcctttctgatcatatgtctaaatgttttacataatggcagtccttataaacatatagttatcctgcttttctcagcacaacataaaacatttctataaacataatttctccataattgccctttttgaatagtttcatagttttatactataattgaataattcagttctgtgttggatcccagtgtgaaaggtcaagtagggtagtggaaaagcattgccttcaaagtctgagtcagaagacctaggtgacctggagtgagttgttttatctctctgagacagtttccttatccataatatcaggattcattcattcagttatccagcaacaactatgtggccaggcgcagtggctcatgcctgtaatcccagcactttgggaggctgaggcaggcggatcacgaggtcaggagatcgagaccatcctggttaacatggtgaaactctgtctctaccataaatacaaaaaaagaaattagccgggcgtggtggtgggcgcctrtagtcccagctacttgggaggctgaggcaggagaatggcgggaacctgggaggcagagcttgcagtgagccgagatcgcgctactgcactccagcctgggcgacagagcgagactccgtctcaaaaaaaaaaaaaaaaacaacaacaacaactatgtactgcactagacattgagtaaacaatggtgaatgaaacagacatggatgggctctgccctcaagaagctgacagccagtgcacaatatcccccatcttggagggcttgaagaggaaataaataggtaaagtatcaggccctatgcaatgtattcagtaatggtaactattctttatactaactaaataagtttgtagacattcataaacatggagtgagccttaattattcaaagtaaactacatcataagaaagaggtaatttacattgccctatgcaatgtattcagtaatagtaattattcttttttgttgttgttgttgttgttttgagatggagttttcctcttgttgcccaggctggagtgcaatggcacgatctcgggtcactgcaacctccgcctcccgggttcaagcaattctgcctcagcctcctgagtagctgggattacaggcatgcgccactacggccagctaatttttgtatttttagtagagacggggtttcaccatgtcagccaggctggtctcgtactcctcacctgcggtgatccacctgcctcggcctccaaagtgctgggattacagatgtgagccaccgtgcccagcccagtaattattctttatactaactaaataaatttgtagaaattcataaacatggagggagccttaattattcaaagtaaattacatcataagaaagaaggtaagggctgggtgcagtggctcatgcctgtaatcccagcactccgggagaccaaggcaggaggatcagtgaccagagatcatgccgctgctctacagcctggatgacaaagtgagaccctgtctcaggaagaaagaaggtaaatagtttagatatgcctgtggagagtaagagggccaaaaatgtgccccatgaagttgctaacacaaaaccaggtgcatataatattaaaagaaataattaggtgtttgttagagtttcttaaaattggagagastataactcatttgattttcctcctaaagtggttttctgagtccatatcccagtgaaggacacctccgttcttccattgactcaggccaagaaccttggagacctccttaaatcctttttctctcacaccccacatccaacttagctaccagtcctgtcatccctctccaggatctggccacctctcaccatttccactgctaccaccaggtccacagcatcattgtctcctgaatgattgggacagcctcctaactagtccattggcttctttctgccatatccacctctaaccacctctccacccagcagccagagtgctcctttccagcaaaaggtcaggttttcttgctcacatctctcccactggcttttcgtctttcctcctgatatgcaaagtttgaaccagcatatgtgaagttctgtaggagctggccccctcctccttctgtcctctttccctgctcccctttgctctctgcttctgccgtgccaaatatgggttcatttcctatgtctccttgtcagggaacaagcctgcctaaaagaacaaagcccttcttctgttttattttcttgctttatttttctccttattattctcttgctttattaccaccaaacatgttatatacttacttttttgttttagtcggccttccctccattagatggaagctccttgagaatagagactttgtttttacttgctgctgttttcccagcaccctggcatgttaatagttgttgaaagatctctgaataagggagtgtggttggctctctcaattgcaataccaatgggaccaccacggttttatctggttaacagcttcacagatccagaattttatgtaatttgtctgtgtatccagaattgatcatattccggagtctgactcatggtaacccagctgtcagtagactgatgcgtaagccaggtgcaaatttgtttactttactattgaagtagatacccttccaatgactgaaatcccatatttaggataccccattcctgctatggaaatacttaggagactaaattgtgaatcaaagtttgtgactgtgaggccgagtgcagtggctcacacctgtaatcccagcacttcgggaggctgaggcaggtggatcacttgaggtcaggagttcgagaccagcgaaactccatctctactcaaaaaattagctgggcatggtggtggtgcctataatcccagccactcaggaggctgaggcaggagaatcgcttgaacccgggaggyggaagttgcagtgagccaagatyacaccactgccctccaggctggatgacagaaccagactccgtctgaaaaaaaaaaaaaaaaaaaagtttgtgactgtgaattccacgctaaatgagttggagtgaaatgttgagcaaacaatatgtccrggctagagatacgtaaaatgcttagaacagtacttatcacatggaaattgttcagtcactgttaggccatgcatcaatggcagcatgataaaatagtcaaagtgtggccaggcatggtggctcacacctgtaatcccagcactttgggaggccgaggtgggaggatcactggaggtcaggggttcgagaccagtctggccaccatggtgaaaccccatcgctacaaaagtacaaaaattagctaggcatgatggtgggtgtctgtaatcccagctactcgagaggctgagacagaagaaacacttgaacccaggaggcggaggttgcagtgagctgagatcatgccattgcacttcagcctgggcgagaaagtgagactccatctcaaaaaaaaagaaaagtgtgaatgttggcctttccatacaaacagtgccaggctgaggttgcctgacccttgtcaggtcttgggaacaggtgtccctctgctatagaggtaaatatgatatgtcagtgattttagcttatcactattaaatatttcacctgtacgattgacagctgttcttttgcttccgtgttcaccataaatctgctgatgatttggctgccatgtccctaacggagagaatgtgttagcctgaggacttgacgttcccatacccttggcaattatatttctagtaaattaataaactggcatccttggttataatttgattttctctgtgagtgtgagaatgtgcttaccctaggatatgaaaatatggtaccattggtgactacatttctgattaaaaatgatgaaaccggccactgcggtggctcacgcctgtaatcccagcactttgggaggctgagatgggtggatcacctgaggtcaggagttcaagaccagcctggccaacatggtgaaaccctgtctctactaaaaatacaaaaatattagccgggcgtggcagcgggcgcctgtaatcccagctactcgggaggctgaggcaggagaattgcttgaacagaggcggaggttgcagtgagctgagatygtgccactgcactccagcctgggcaatcagagcaaaactccatctcaaaaaaaaaaaagaaaagatgaaactagccaggcgcagtggcttatgcctgtaatcctagcactttgggaggccaaggtggatggatcacctgaggtcaggagttcgagaccagcctggccaaaatggcaaaaccccatctctactaaaaatacaaaaattatcccggcatggtggcacatgcctgtaatcccagctactcaggaggctgaggcaggagaattgcctgaacccaggaggcggaggttacagtgagctgagatcatgccactgcacactccaccctgggcaaccctccgtctcaaaaaacaaaaacaacaacaacaaaaaaacatgatgaaattggcattaagtgttaataatgaatcgtatgagcttggttaaagggagcgcatccttgagaactggtactggagttggtgaacactattggatttcagccctgaggctgaggactagaacaccagactgtgccttgtttaccaaagtgctgtcaccttgccacgtcttgcgagacagactgtcattctctcaaaatatccctgccccacaacactggccgtggagtgttgtagcccactgtatattaggagaatcttttggagggatagtttgagaaaatgtgttaaaattataaaatcttttttttttaattataaaaaaaataaaggcagggtgtcactatgttgctcaggctggtcttgaactcctgagctcaagtgatcctcctgcctcagcctcctaaaatgctaggattacaggcacgagccaccatccctggccaaattcataaaatctttttctatcatttgacccagtaattctccctagggggaaaaaaaaaactcttctgaagaaataattcaaatyatgggaaaagctgtatgcatgaagatacgcattttagcatttttttaatttaaaatcttaatttgccaaatcacttttcacctgagactcagcattacttgtaatcactgaaaattacaagcaacccataatccagcaatagagaagtaattatgtaaatcattgtaggtcagtttaattaaataacacagctactaaaaaggataaagacctgtaatcccagcactttgggaggccgaggcaggtggatcacctgagatcaggagttcgagaccagcctgaccaacatggcgaaactcacatctctactagaaatacaaaattagctgggcgtggtggtgcatgcctgtagtcccagctactcaagaggctgaggccagagaatcacttgaacacgggaggtggagttgcagtgagctgaggttgcagtgagccgagatcgcacatcgcactccagcctgggcaacaagagcgaagtgaaattccgtctcggaaaaaaaaaargggaaaaagattgggtcaggtgcagtagctcatgggtgtaatyccagcattttgggaggccgaggcaggtggatcaattgaggtcaggagtttgagaccagcctggccaacatgacaaaaccccatctctactaaagatacaaaaattagctggatgtggtggcgggcacctgtagtcccagctactctagaggctgaggcagcagcatcgcttgaacccaggaggcagaggttgtagtgagccgagatcttgccactgtgccccagcgtgggtgacagtgactccatctcaaaaaaaaaaaaaagattaaaaatgtaacagtgtgggaaaatgttgataattaatatagagtgaaaaaattcagcacataaaatacttaggtttatatttaaactaagattatgactataatttgtatattctaatttgtgtatttgtaatcttaatatacaaattataaggcaccacgcctggcttttctttttcctcctcagacatgaggtctcgccgttgcccaggctggtcttgaactcctgggctcaggtgatcctcccaccttgacctcccagagtgctgggattacaggcatgagccaccacccctggcctagaaaaatattaaaataccattaaggaatattcaaaactggttattatatcagggtagtagaatamgggattttttttttaatctattttccattgcagctggttttgatggttttgaatctgttctctggcattctgtcctgcagttgccaccagctgaccactctgcaatayaacttcttaaacttgcagccaggaggagccctagggcagggaaagctgcagactagctggcttcctggctgctatccaggcaaggattttgttttctctattacagtcgattatcctagactttagggagcaataggtctctggactgtaggtttcagcctccgttctgggcttatctttggattcttgttgatgagtcaaaaaaaaaaaaaaaaaaaaggagtgaccatcagatgtttgctaactcttcaagtatgagctcaaccttgttatctgcctggagtcatttcctttgaaaatgtrtggtagactttgccaaagtaagtagtaatgtcccattccttctcaggaaaatgtgtacacatagatcaaaactatgcattgtaaaactcatatctgtttgaaaacatagaggtagggacagaaagtaaacatatgaaggatttgacaggacacattaccagcctggtggtcctttttggaaaatgtttgctttctcgtaattgccttcaaaatagggacagtgtcctgaatgttggttacagttgttgaagatttctttttgagattatgcttggatgatggggccttaagaagagaacccacccagtcctattttgtgccttcgtttggacatgttctcccttttcttccaaggtactatacacttaattagtattgggtctagtaggactgagattttgttttccttttttttccctagggttctcagaagcgagctatctctaccccagaaacccccctaacaaaaaggagtgtgtcaactcgtagcccccatcagctactctcaccgtcaagtttctctccaaggtatggatcataattcattcaagtgccataaagctggcctcccctcccctttctctggctatctgaggaaggctaacagcagagttattaattaactataggtgggcatgtacctctgcagtgaattggcttgaaagcctattgctctctgccttccttgctctccttttctttgtggaaaattactgtttcttacggtaattaaggaaactcactttccacccacttttctagggctcatttcctagatcgggaactgatatcttgtattgaaaacaacctgtctattcagaagtctaagagtcttaacaggtcttgtcagtagaggcaagtaggtttccacctgcttctgtttgtgttttgttgggtttctttttctttcttttcatctaaagtttttttttttaaagaaaagcacatatctttgttcataatgtttcataacctgtttattgtttccaagtcaggttagaactagtttctgagagttttcttgtcactgtgactctgccctgacttaattggtattttgtccctctgccaccattgcacataaatccacaaagatcatatgtaattttttgaaatccataaatgacacgtctcatattagagaattccataggcaagtgctctgctgagtagatgggtttttaggagtttccacatcaagatgaggctccggagcagtagtattaacccttcagggaaacaccaactgccaggagtcattacctctactttggatcacttctagatgaaccagagcttaagattgttcaactctatcactttttttttttttttttttgagatggastctcactctgtcacccaggctggagtgcagtggcaccatcttggcttactgaagcctctgcctcccggttcaagcgattctcctgcctcagcttcccgagtagctgggtctacaggcgctcgccaccatgcctggctaatttttgtatttttagtagagacgaggtttcgcctgttggccaggctgatcttgcactcctgacctcaggtgatccacccgccttggcctcccaaagtgtaggatgtcaagcatgtgccactgctctcggccttttcagctcyatcactttagaaaggtggtgatagaagctctgcagtcattcaaggtgagtggtcattggattttttttttcttttctttcttttttttttttttttaagataggcttttactctgttgcccaggctggagtgcagtggcacaactatagctcactgtagccttggccttccaggctcaggtgatcctcctacctcagcctcctgagtagctgggactacaggtgtatgctaccaagcccagctaatttttataatttttgtagagatggggttttaccatgttgctcaagctggtctcgaactcctggcctcaagcaatctgcctgccttagcctcccaaagtactgggattacaggcatgagccagcatgcctggcagtaattggattttgaaggacagttttactttagggtartctactgctgctttggggagttctcaggctttttggaagaaagctttctagacttaagagcatctttgcaacctggtatgtagggatggttcttatagacgtgccagcaccattgcaggagttatattctccaaatgtcaatacaatgctctgaaacctgtagatctgtttacaactgtcctcatgtgagcatcttgctgcattaaagggcctgctgtaatggatggctcatggagcttcccagggaagagcttggagaagctggcaaaatgctgcctagtcattttttaakgcacactaataaagctgacagcagaaactggttttgtaatgtatgaaagtaacttctaaactattcacgtagaggtggcactggagattgagataattaattgagctcattttctgtaggctgtgaaaagaaagaatgatggcattaattgcgatggtgccccacataaaactggttcccgcagagtttcagtgcattaaacaaagcctgttttaaatagacctctctgtacggcgtgtttacaaccagaggattagaagacctcactgtcatctaagcagatcagcaatatcyatgtgttcttagaggtataatttaccagtcagggagtggaaaygtgagaacttggcagttgagcctagaaaaatgggaatgtttgcacatcaccagactgttaattcattacttacccacctccatagacactggggaaaattgattaatttkaatttcattttattgttgtttctaccttgaaccatattgtgagtttttatatatgctcagcaagttttagcttatccacagttgcaggctcagatgatgttccaataaatgctaaaaattcatgagaagaaaaaaatgggacttaaagtttgccttttaatcaattcagaatctggggatctttttgccttgcttagttttaatgccaagagaacgacaactttttaaaatacgtttctgtctctaaacttctctaaaaatgtttggtattcctcagcctggtattcctcagcccttcattcctgaaattccttaaaggtctgggtatgtccaaccccattaaactgattcaatttataaactatgaggccaccttccttttctccagtccccatttccaaaggtaacctcattttattcttctctccctttagatatgaacacagtaatattaacctgttttgcttccaattagtgctactccctcccagaaatacaactcacgaagtaaccgaggagaagtggttacctccttcggcttagcacagggagtatcttggtctgggagaggaggagctggaaacatcagcctgaaggtcttgggatgtccagaggcactaactgggagctacaaatccatgtttcagaagctcccagacattcgagaaggtgattgtttttccctttgaaattctggtggatataaaaccacctagaagggtgtagagtaacaaagcttcagctaggctggtagaacaagttccaaggttgcctttcaatgtatgagttggtagatgtcctcatggaagccctagtaatggagggacacgggcaatactatcagtgattgccccaagtcacttcactttgctaaaacgcacataaccattcccagcagcaaaaacttgaacgatgtaaaggaattcaacttaaagatattcatggttccttcgttagaagccttcttcaggttggccttgacttgcctaaaacctcagtgaggacttgagtaaagggcagacttggagatggggtggggttcatgctgattccctggaattgtgctatggggtctcctgtggccagatggaaggccagattcagcaaccaaatatcggaaaattggcaaaggttttagaaggtttaaactggccagatgtccaggcacccttcctgcttctgtaaaatgactgactttaatattttacaatgtgctgtattttctcttcttggcaagtgaaatgtcttaaacataatacttttttccacttctgggattgtagttctgacctgtaagatagaagaacttggcagcgaactcaaggaacattacaagattgaagctttcactcctttgctagccccagcacaggtaagagttgttctaatagttctcactaattaatattacgtttttaaatcgatgaccaagaggcatccttcttgcttcctttttcacttcttgtctgtgttctagtttgaacatctgtcttggttgaatttgggaaaatgggcccttctgaagaaaratttgtaagtgctgtctggttttgtggccagagagtgattttcttcccacttggattagagtcttgcacataagcagagactcaaggccttgtttcccttgrtggtgagtcaggtagctccccggggatttcccacaaatagaagcattcacgtatcgagataaaaggacagcagcgacggtggggttttcagaatcttgttctctggacaatgactcacagtctctcccctggtttggtctcttgttatagacaaactgctgccaatagtatctttatatcatagtttaatctggcatatataccagtgctttctctctagaatgttttctaatctaaggggaaatatattctagaagtttctttaaagtacctttgtcaatgtttacattcaaagaatgatcagttggggaagtgatgcagaactgtgtcatagaaggaagtgttagaggacttggaaggaagtaattgagggaaggcagggaggcacaatcactgggaaagatgagacttcctctgttttctcccaagagtgggaacagaacagaggaagccatggagacagagattttagctcaattaataaagaacttcctgttaagaggttgtatggtatgtggctaaggatatggctctagagccaaatttctggtttcaaacccaagcttcacccacagtttgaccttgactaaattatctaacctttctgttgcttgttttcctcatctgtaaaatggatacagtaatatccacccgatggttgttgcaaggattaaatgagttaatacatataaaatgcctaagaatacattttagaacagtgcatggtatttagtaagctcaagaaatgttagctattattaagtagttatagctgcccaaagatgcagtgggctgccctggggtggtgaggacagggtggggtaggcatccaggggcaagttcccctacactagagatgctcacacttaggcagcctcctaggaaggctcaagtgctgggtggatgggtggacaagatgccctttcagagttcttccatcctgagagtcagtgatgacgcggtagtcacctcagggtcaaagcaatgccctgccaagaaatgtatttgttgtttgcagtttgttttgctattcaccctatcgacttcagattttgagctcctgctccaaagactgtcattcttatgctgtgaccttcctttggtaggagcctgtcactctgctgggccagattggctgtgatagcaacgggaagctgaacaacaagtcagtgattctcgagggagaccgggaacattcctcgggtgctcaaattccagtggatttatctgagcttaaggaatattctctgtttcctggacaggtgagattggaggagttccaccagaatgcaggcgcactctttacccctgtagtgtaggtgctgtgccatgcgcagctgctcctcagttcctgtctctgctgccatggggtgcagctggagcacatgccccagagcagacaccactgttgggattcctgtttcccccatgctctgacccaggctctgggacctgactgcgcagcctcaaatcccaactccccgctccatgaggtgcatgactgtgcacaaggtacttaaccatctaaactacagtttcttcactcacaaaatggaaataataattcttacctcataggattgttgtgaaaattagatcacttatatagagcataattattattactaatgcaacgcccttaattcgttttctacaaaaatgccctaagtttatgattacagaatgagagtagttggacaatgcttttaactgcctcaaaataatgtattccagacctcattgatctccactgcttagcaatcctgtttgtttttgtctttcaggttgtaattatggaaggaatcaacaccactggtaggaaacttgttgccaccaaactctacgaggtacacagcagtacccccacttgcctcttggtttgcttcagacaaagtatgtctggaagctgtctgttctagaarctggtcctttttaggagcccatttatttgttagtcagttctccatctgtaagtgggaacccacccctaggccaggggtcagcaaaccctttctataaagggccagacagtaactcttttagactttgtagctatatggtctctgtcacaatgactcaattctgcctttgtctacaaaagcagccatagaggactcttaaacagatgactgtggctgtgttcccataaaactttatttaaatagtgggctgcagccaaatttggcccagaggccgaaaggttacctatccctgctctaggcaacaatcctccagagattttcgtagaatgccaggaaaagtagcaagaaaccattctctcccatccttgcctagaagtacactgatactttaggcacctgttttgctcccacttgttgctgggtattttatgacaattgagtagtgacctcccattacctgggtttctttgccctctgagcagtatagaaaaatggcaggtcccatcagatccagggagcaagacagaggcacatccttcccctgccctctcgctcctccccactgtcctcccatcacacacctgcaccacccccaacctggtgccctcccctttccttaccaaggtgatgcctggcgcaagaccttacttgagcttttcccctgtttttagggtgtgccacttccattttatcagcccactgaagaggatgcaggtgagtttcggttcaaatattgttttgccaacaatgaggatggtagacatgagtccaggagtgcagtttcccaagcccaagaaagctgcagaagctgctgaagagcaatgtgaccaagcagtgagggcgccaccatcatgagttcgtaggttttttgtcacaagacccctggtctgagcccagtgagcgytggtcgtgctgtcgcctgagttctgcctacatgaagcatgttgtttaaagactaatgtttaacaggtatttttgaaggttgccttggaaaggaaaagatgtacgatttcaaaaagaatttatttacatgcagcatgggcagatgcggtggctcacacctgtattcccaacactttgggaggccaaggtgggaggatcacctgaggccaggagttggaaactagcctgggcaacatrgggagaccctgtctctactaaaaattaaaaaaaatattagctgggcttgtggtgcatgcctgtagtcctagctaatcagaggctgagacaggaggattgcctaagcccaggagttcaaggttgcagtgagctatggtaacaccattttactccagcctgtgtgacagagcgagactctgactcttaaaaaaaattaaaattaattaattttttgaaagtataatgtggcatcctggattggatccttgaagagaacgggaacatcagtggaacaactagcaacatctgaataaagccaggaatttacttttttatttttctggctctaacactcaacctcgagaatccaggaatttagttaacagcgatataccagcattaatgccttaattttgacaaatgttcatggttacctaacatgttaagattaggggccactggtgaaagacacacaggaactctgtactatcttcataacttctctacaattctaaatttgttctaaagtgaaaacttaaaaataacttcctttttttttttgagatggagtctcgctctgccccccaggctggagtgcagtggcaagatcttggctcactgcaagctccgcctcccgggttcaggtgattctcctgcctcagcctcctaagtagctgggattacaggcgtacaccacacccggctaatttttgtatttttacaaaaccccatagtgatggggtttcaccatgttggtcaggctggtcttgaactcctgaccttgtgatccgcctgccttggcctctcaaagtgctgggattgcaggcatgagccaccatgcccggccaaaaagaatttctttaaaaccctagtgttatgtggtaactaatctagttgtggaaaggcaaaaagaaagtttgacaaactttgcttctaaatatttcaacataatttcagcacttcacagggctgaggtgggaagatcacttgagcccaggagtttgagaccagcctgggcmatatggcgaaaacctgtctctacaaaaaaaaaaaaaaaattagctcggcatggtggcatgtgcctgtggtcccagctgctcaggaggctgaggtgcggggatcacttgagcctgggaagtcaaggctacagtaagccgtgatcatgccactgcacttcagcatgggtgaaagagtaagacactagatagatagatagatagatagatagatagatagatagatagatagaatttatttatttcaaggtggccaggtgtgatggctgacttctgtaacccagcactttgggaggccaaggtgagagaattgcttgagcccagtttaagtttagcctcccrgcacatagtgggtctgcatctctacaaaaaataaaaacaaaaaaaatcagcttggtgtggttgtgcacacctgtatagtccccactacttgcgaggctgaagtaggaggattgcttgagcccaggaagtcaaggctgcagtgagccatgattgtgccattgcactccagcctgggtgtcagagtgagaccctgtctcaaaaaaatatatgtatgtatttctgtatttcaaggcattgktttttttttcttttttttttttttagacagagtttcactcgttgcccaggttgtagtgcaaggcgccatctcggctcaccgcaacctccacctcccgggttcaagcgattctcctgccttagcctcccaagtagctgggattacaggcatgcacctgtaatgcctggctaatttttgtatttttagtagagatggggtttctccatgttggtcaggctggtctcaaactcccaacctcaggtgatctgcccgcctcggcctcccaaaatgctgggattacaggcatgagtcaccacacccaaccctcaaggcatttttgtaagcacagtggagcactgttaaggattagcaaccagatcactgatactagcatgttgtcaacaccccatgcatgtaacagtggccagagccattcttggagatgacctagaatcaggagtgaaatttaggaccttgtgatattgcacattttatcagaaaacacaagtttggccgggcgtggtggctcatgctggcgcaggaggattgcttgaccacaggagtttgagagcagcctgggcaacatggtgaaacctcatctctacaaaaagtacaaaaattaggccaggcgcagtggttcacccctgtaatcccagcactttgggaggccgaggtgggcggatcacacggtcaggagatagagaccattctggccaacaagctgaaaccccatctccactaaaaaatacaaaaattagcttggcttggcagcgtgtgcctataatcccagttactcaggaggctgaggcaggagaatcgcttgaacctgggaggtagaagttgcagtgagccgagatcgccaatgaactccagcctggcgacagagctagactctgtctcaaaaaaaaaaattagctgggtgtgggcatggtggcatgtgcctatagtcccagcaacctggaaggctaaggtgggaggatcactctcctgagtccaggagttcaaggctgccatgagccatgatcataccactactgcactccagcctaggagtgagagtgagatcctatctcaaaaaaaaaaaaaaaaraaaaaraaaaaaaaraaaatacaaatttatagggggcaagggtggcatgctggtattaggtcaacttcaggtaatgaaatcaacctggctgagataccaggagcctgagctgtgtaccagagaagcctttggaaacagtttaacaggttgttaatgaacttttgtacaaggaattaaatgaggcactcatggagatacagaataagacatggccctcgccctccagagactcactgcttacactggggctcacatctcctgtaggcttctcagagccaaacttaactttgtcccctaccccaccaccacatgaaacctgctcttcaccttgaatgctctgtcagttcatggtattattaccatgatagactgaatcacagccccaggaatccctggaacctgtgaatattttaccatttgtggtaaaggagactttgcccgtgtgattaagttaaggctgttgagatgggggattagcctggattatccaggtgggtccactataatcacaagggtccttataagaggaatggcaagagaatcagagtcagagcttagaaatgttaggctgctgtgatttgaggaagcctaaagaaaaattttatttcaaaatagagaaatcttaggcttctggctttgccgctgcaggtggggccatgaaccagggaatgcaggtggcctctgaaagctggaaaaggcaaggaaatggattcttctctagaacctccagacaggaggaactcagccctgcccacaccttcagtttaggatttttgacccctggaactgtaatataataaattcgtgggcttttttttttctttttttttgagacagtctcactggagtgcagtgggcatgatcacagctcactgcagcctcaacctcccaggctcaagcaatcctcccacttcaagtaactagaactataggctcaggaggtacgcaccactctgcccagctaatttttgtattttttgtagaaacagggtttcattatgttgcctaggctggtctcgacctcctgagctcaagggatcctcccgccttagcctctcaaagtgctggaattacaggcgttgagccaccacacctggccaaattcgtgttgttttaaggcactaagtttgtgataacttgttatagcaacaataggaaactaacacaacagcatgttaagaagccagggatctttggattttgttgttgtaagccacagaaactggctcagactaacaagaaagcaggaatttattaggggagatccaggtagctcacagactggacacgtggctagaaaccgaggcttggaaccaagatgagagcccaggaactctagcatccaggtagcaggaattccccagctgtctcatctgggcacctcagctggaataggttagctctaaycttttttctctccttggatcgttcacctcaagattgcagaccctgggaggagagtgtgaatggccttgtgccrttctgggtcatgtgcctgcccttggctagaggaagacagagcacccaatttacagccccatgtagactgccttgtggagggatgggctgattctccaaaaggaaagcagctgctgttaggaaaaaggcaaagcgtgatgggtggcccctgcaccccatcaccctggagtctcccgttccagtctcccattccccggcctgtctttctgggctcttcagtaccccacattctccagccacactggacgaccagacatttcctaacactgagcacactcaggtctcagtgctatcctgtaccctgccttgcccttgatccccaaaaattctcaaacgtgttagcaaattccaccttggtaaattctttcctgactgccactttcctcgaatctttcatgtgcacagctcataaagtttctactgcatgttctaggtattcgtgtacctgcctgtctctgtctctatcacctagtggagtgttcttggagggtggacatgaggtcttccttaccttgggtccccagagtttcacacataaaggactcaatgagttaaatcctgtggcatttcccatcattgtcctttctcctcccaccattctaatactagtcctcttctaatcaagacctataacctctgtcttagactttgagcaaagcatggtcctggttgcctgtggaccatacaccacatctgacagcatcacgtatgaccccctgcttgacctgattgctgtcatcaaccatgaccggccagatgtctgcatcctggtaagaggcaccagtgggaaagctgaggagtcagccttggaaaatggctttaatgaagttctaaatttttaggaagcatgtcagtccctcctccttttagaaaatatcttttcattcttaatctacatctttggagaggtatatatatctatgggcctttgctagatttaaaagcccaactttggccgggcgcagtggctcacgcctgtaatcctaacactttgggaggccgagatgtgtggatcacttgagggcaggagttctaagccagcctggccaacatggtgaaaccccatctctactaaaaatacaaaaaaattagctgggcatggtggcaggcacctgtaatcccagctacttgggaggctaaggcaggagaattgcttgaacctgggaagcagaggttgcagtgagctgagattgcaccactgccctccagcctgggcaacagagtcagactccatctcaaaaaataaaaataaaagcccaactttttttttccacccttcgttgattttacagtattcttacttctttctcattactccaacttctgaactaatctctttttaaagctcaaaatactattattagtatggtgatcaatttaccttgctagatttagaaagtcagaaaacccagtgtgcatttttattgttcgtttgtttttkgtttttttttttttttttgggacagagtttcactctgtcacctaggctggagtgctgtggtgcgatctcggctcactatagcctccacctcctgggctcaagtgagcctcccctatcctccctgagtcttccgaatagcttggactacaggcacacgccaccatgcccaactaatttttgtatttttttgtagagagagggtttcaccatattgcccaggctagtcttgaactcctgggctcaggcaatctgcccacctcagcttcccaaagtgctaggattacagatgtgagcccagtgttatagtggttatggggctctgggagcctccctccatctggggcaaacgtgtttctgcctgtgaaattggcttggcgccccgccagcccatctgctaactgtccccaggctctacaggcagccttggagggacagatgagccctccacagagaactgccagaggaggtatctgaagtcattcacagacacaagtgattctgatttgttcttttggtgtctttgtttctccccttgcagtttggccctttcctggatgctaagcatgaacaggtggaggtgagtgggctggggtgggaaggggtcctgggtacttgartccagtcaggctctcacttttcattttttagtgtttatcccacatctgtaacaaacacattaagtcctgtggctaatcagaaaatcattttagcagagcactttattaataaagatctggaatccaagggcctcctttcaccagaatacaaggctgtctggaagctgggggagggacatataagtcctaatgttcctttgtttgtgatgcctgctgctaaggcacaagagcactagcacaaatgcaggtgtctggcagtcatgggctgccctgtgaaagaacctgtcctggccaataccccaagcttataactcatcttgctgtcctttgcataaaacacgaatggtccttcctgggacatctccatggctgaggtctgggacctccaatccttcgtctcacgatactttaccttccatggaaaatatttcaaagtactctttcttttagtctctctcagattgcattcaagagggttaattcccacatctcttctcctcccttcgactagacttagctccttaagacaaagaccatgtctttttcatctttgcgtctccttcagctcctagcccaacagctgacttctatgggtcacctaacaatgttaaacaagtgaataaacascaaacatctgccgtctaaatctgtctcctttcctttcttgcagaattgtctactgacaagtccatttgaagacattttcaagcagtgtctacgaacaattattgaaggcacaagaaggtcagatttcaaaatactggacagaaccttaagcttcttaggtttctccagagcttcccattaagaaactgaaactgcttaaaagtcgtggcagggccaggctcagtggatcacacctgtaatcccagcactttgggaggccgaggcgggcacatcacctgaggtcaggagtttgagaccagcctggccaatatggtaaaactctgtctgtactaaaaatacagaattagccaggcgtggcggtgggcacctgtaatcccagctacttgggaggctgaggcaggagaatcacttgaacctgggaggcagaggttgcagtgagccaagatcgtgccgttgcactccagcctaggcaaaaagagcgcaactccatctcaaaaaaaaaaaaaaaaaaaagctgggcgtggtggctcacgcactttgggaggccaaagcaggcggatcacctgaggtcaggagttcaagaccakcctgatcaayatggtgaaaccctatctctactaaaawtacaaaattagctgggcgtggtggcacatgcckgtartcccarctactgcggaggctgaggcaggagaatcwcttgaacccaggaggcagatgttgcagtgagccgagaccacaccattgcactccagcctgggcaacaagaacaaaactccttttccaaaaaaaaatcatggcagttcctattctttccttccttttgaactaccgagatcagctagaacccttgaacttcaagtgcaagttaagaggcatctctgtaaaacacaaagataaacatacttgacaaggctgcatcggctctcactctttggttgctctttctcttctatacttagttccttttctcactcccttttgtataaactaatattccacgggaatcttcccaggatggttttgagaagtgtttgatgacttaygcagtgaaatcctgtgagaccccaaacatcttgttgtgtaagtgattgtattgggtaagcccaagttcctcccaagtcagtgcttccccagggtgcgtgggaagctgccagtggctacagctggtggtgatagaaactctcagtgagggtggggccttgaatccttgccatagaccaaacggaaggaactgtgagaggttacagcagtgatgagagagctgtgcagttctcatttgagaggaaagtcactgttccaggaagaggctaaagccggaagtggaaagttattcagaaatctgacatcctccattcctgtcccttttccccagtgccagggtttgaaagaagttggtataggtggtagatctcctcacaagatctgcatgcttgtagctgagctaataaaatacaaatattcctgaggctaagcatttaaaaacgagtctgtcacaaaggtggtttttaaaataagatgtctaaccttccgccttttagccatgagaactgatcccagaatcaataagttgtaacattaccttcttgtaccagcagtgtgggccaggatggtagatgtcacagctggaataaagaacatcccccaactcaccccagaatcagagacttgggttgtgccagtgacaaccatgtctggttctgccctttcctcccctgcctccctcagatgaaggtgatgcaggtgccttccctcttccccagatttgctgtgatcctggtcaagttcatcaggcctggagagtggttggaactcctcaggagatagacccccaaaacacaggagcagggctgtgttcttttgtcagcccttggggataggcagggactgtgttgtagtgccctaacactggctgggtgctttcagtttgaggtcgggttctgtttttggttccttaccccgtgtggtattgacagcagtgatagaaataaagcacagatgaggcattgtcacactggggatgagagcccagcaccaccaggcactttcatctatggccagtgtgtgccacagggcagggggagctgccccacccttctagaaacagtatataaacagttcttgggcagagaatttctttgtattcctgagaggtcagaaatgcagagcattaagctgagtcatcattagtaaaagtcagagccaggctaagcacggggctcacgcctataatcccagcactttaggagactgaggcgggcagatcacttgaggtcaggaattcaagaccaacctggccaacayggcgaaaccccatctctactaaaaatacaaaaattagccagatgtggtggtgggtgcttgtagtctcagctactcgggaggctgaggcagaattgcttgaacccaggaggtagaggttgcaatgagccgagatcgcaccactgcactccagcctgggcgacacagcaagactccatctcagaaaaagaaaaagagccagtgagaaagcacctcagagaaagcgagcagagcccgcggttctcgtcctgtttgcgggagcagctggaggaccctcccgctgtgacgtacgaggttgtgcaatgctgagcatagttgggatgtttttctgatccctccttctataggcgctttctaaccatgagcaggaaggctatttcctccttaactattgcccttccaaagcctacactgaaacagggcaattttgtcccttgagagcagccagctgcacctcagtcctttgtgtttatcacagatgtcaagcccttgagatgtggagcacagattgtcccattcaagttaccctgtggcctgtttaccagaccctggcacccaaatggtggactggatcaccctagtgagcttctcagtgtcaaagggacaataatgaatatgcaaacacctttggtctcaggattctgattttctgttatagacatctcagttcacactctgagaggacaccacaaacagtgataagggtgacagctgtcaccagcacctttatcacatgtgaaagtgtatgtatgcctgagaagtccacatgttttaagcaagagacagagatggaagtgagagctattggtggattttaaacatgcccgcaaagtaataccttatgcctatttgatttataaacggcccctctgccaaggtcatcttaagggaaccaaggaaacrgggctttcttcctcttttgtgtggctgggaaaaataaatagttggcccccagagttacaactttcttcttcacttgtatgttgtaaccctagagattctcctgctccatcaaaggaaacatctgctgtcatctgtgcttttactgttgctgttaaatatttctttcatttttgcatgacaacctgctgagaaatagaaactcagggcattatttccatgtgtgagaggggagggatgcgatggctcagggagaggccgcttgggcttttctgcctcccactggaaatgtctgtgtctcggttgtccagtaattatggcccagtgttcagtcagtcagagggtttcagctggatcttctaaatacgaagccaggccaggtgtggtggctcacacatgtaatcccaacactttgggaggccaaggtcggtggatcacttgaggccaggagtttgagaccagcttggccaacatggtgaaaccctatctgtactaaaaatacaaaaattaggtgggtgtggtggtgtgcacctgtagttgtagctactcgggaggctgagacacaagtatcacttgaacccaggagatgaggttgcagtgagcccacatcatgccactgcactccggcctgggcgacagagtgaggctctgtctcaaaaaaaaaaaaaaaaaaagcagtctcagggtctttttagtatgcctgccttctccctaggaaaaatgccccagctccatgcaccctaccaaggtgtggcagggacactgtttactgcctgcaggctacacctgcttagaaggtgtaatgagtccaagctgtggtttaaactctggctctgaggctgtgattctttattcacatccttgtctttctagactttctagatctccatttctttgcccctttttctgccaaaaaatagtctccatcctctcagtagaaagccacacagagcaacaagaaagtgtcccaggcaatcggagcctgtccagatggatgggtgtgaagtagaacaaactgtcctttactcccagtgtcccatgggaaacagcgtctctgttcataacagagtgcagttctgagctgcctccctcggggtgggctctgcctccagcctgaggcatcccacctgttgcgcagctgttctaactcaactgcactcacttttctcactcttctgtttgttcttttgccatactagctccggctcccaccttgtctttgtcccgtcattgagagatgtgcaccatgagcctgtgtacccccagccgcctttcagctactccgatctgtctcgagaggacaaaaaggtagcagcacccactccttgaccagcaggcagccagaatccagcatgcctctgccactagctctggccctgaaggggagggtggagaggcctctttagggtgtgcgtacagcctgaatcttaaactcctttttttaaacaggcaaatgtgtccaaaagcttgatgtatgttggtttggtccccctttccgtggtctccccagccctcagacaacccccactttcatgggaagatgtttctagctttggcatacaaatgtttgtttcaatccgttctcattttagcaagtacagtttgtgtccgagccctgcagcctctccataaacggagtgatcttcggcttgacatccacagatctgcttttccacctgggggccgaggagatcagtaggtaagaagtgtgttccaggccccaagcaggatgactggctttctggtcccagccctttctgcagccaagaaaatcaaggggctgcttaacggtcttgaccagagagagctgaaagcagcaagctgtgccagaccctctagccatctgagtttctctgtacccmaggggaggggttggatgcattagtttctgttaccacctctctaaactgcgtttgagaccccaaagaaccacgtccattctgtctttgcacttaaaggcatcaaaattcatctacattttcttttctgctccccttttttttcatttcccaaatttgtgacctgaaaacaaatgtggacatcctgtttgtggaggataaactgggaattttctctgaaggattttcttcactaccagtacaacatccagctctgcagagaatcaggccctgacaaatttgttgagttgaagttgggcagctccgttctgccgtcatccttgatgggaaggggcatgtgaagcgactcgcgtgtgaagcgagacgggtgcggctccttggctgaggtttgagattcaggtcagcctggctacacacccgcctcatgatggtgccaactttgcatcctcttgcacagtacggtgctggctaatggccttccttgatcttgattatgagggattcctgtgctttcccttctcaacctggtgtcctgcgtccctcctcatgtggggacagactgagctccttgtgggtgggtctttaaacttccccagaggcatcctcctcttgttgctgtgccttggccatttaccttctctctggtttattaaattctccagtcctccctgaagagaaatgggctgaaaaacagagttctgttttcatgctttcttttctttcccagttcttccggaacttcagacagattcagccgaatactcaagcacatcttgacccagaggaggtgagcttgccgctgggacccctgactgtggagagagtgccttggggtcatggagctatgacaagcatgactgtaagagccttcaccaggctaccagcagggaactttaccctgtgatgacaagcctgcattctgccccacacacacagagaaaaagtcggtctgtggatgccagcagcacgaaagccagtacctagggggactctgtctgagaagggggccccccggtcagctagtgctgacaatttctctctgtctctgtagctactacccactctacccgccccaagaagacatggccattgactatgagtcgttctatgtttacgcacagctgcctgtcaccccagatgtcctcatcatcccgtcagagctgaggtacttygtgaaggtaggtttgaactctgctttttcccagaaacaccagaacccagtctttgactttcccttctagaccacccggcactcacccctcatgggtcwgctgatggggatggggcctctagcaccctgccctgtggccttgtttctttggggaggtggtgggaccagaaaacaaacaactctgtcagtaaaatgcttgagtaaacagtgtcctctcctccctccccaagagaacgagagcccagatgactaggaaggccctcaaatgagggctttcaccaggccacatagaggtgacctggggaagatttcatatgtacacttgcctgtcctctgcctcccaaattctgatatgacctccaagtgggctcagctgggaataccttgaagaagctattgggtcattttgatctctgccaccctttagccctgcctgccttggagttaggtcccttacaaggaatctgcctagaccagtccccctcttgccaaacaagagttagttcaatctcaagaggttaaaaaaaagtttttcacatgagaaagcagtaaacagctagatcaggtttgtctccaagtttaggagctgattgtcattctgccaagtcacctcattcttctgtttgaaagacttaaaaggaattcaaagctttctagtgacaagttaacatatgtgactgaggccgggcgcagtggttgacaattgtaatcccagcactttgggaggccgaggtgggtggatcacctgaggtcaggagtctgagaccagcctggccaacatggtaaaaccccatctctactaaaaatacaaaaattagccaggcatggtggtgtgggtgcctgtaatccaagctacctgggagcctgaggcaggagaatcgctggaacccgggaggtcgaggctgcagtgagctgagatctcaccactgcactccagcctgggcaacagagcgagactccatctcaaaaaaaaaaaaaaaaaaagtgactgaaaatgtgtctggtgatttggttgccttcgtttccattttctaaaaccctctttggggtccagccatgtgatggcacttctttttcacattggttcccagttagttgaggctctccaaacctgtcacctctcctctcctccccaggatgtcctcggctgtgtctgtgtgaaccctgggcgccttaccaaagggcaggtgggaggcaccttcgcccgactctaccttaggaggccggcagcggacrgggcagagaggcagarcccatgcattgctgtgcaggtcgtcaggatctgaggcttctgtcctytgctgttctctgctgtgtgggcccttaaagtcttagccaagagccaagacatagccctgtgacaaggtgaacagttgggtgggaaaggagagaggagccagccagggaggggcagctgcagtgaccaggcccagcagggaggacttgtgcagccgggcctgcctstgagtggtgcctctcctggaaggaagctcttgcttctcagtccatgctccgtgtccagaagtaagccagctgtggatcccgcccactcagaaaaggcgagaaggctttgtgattttctacatgaatcaaacacagaaacaacttttggagaaattaaattctgagtgtgacttctgagtttgacctttcttctattttcttttatttatttattttgtttttagacggagtctcgatctgtcgcccaggctggagtgcagtggtgagatctcggctcactgcaagctctgccgcccgggttcatgccattctcctgcctcagcctcctgagtagctgggactacaggcacccaccaccacgcctggctaattttttgtatttttagtggagatggggtttcaccatgttagccaggatggtctcgatctcctgaccttgtgatctgtccgcctcagcctcccaaagtgctgggattacaggcgtgagccaccgcgcccggcccctttcttctattttctttatcctggtagtagacaaagaatgttgcctatttgacctatgtccagagaaggcagagtgtcagtcacactgggtttctatccagccccagtcctgtccagtgggtaactctcagccccactcctcatcccccaaaggccccagtgacctctatgctgcagaggtgcactgggtgggccctagagctgggctgcagagcaagcaactggctgcatgcctgggcctccctgcgcagttcctcacatgcatgctgtggtcccagcctgacctctccatctggagggggccgcctcgctgggctgttccaaagctggagtcctggtggcagctgctttgccaagtcgcgcagtagccagggcttgcctgcagcccagaacactcagacagggtcaggccttccagggttcacagcacgtcccatgcccctatgtcctggcatctggggaaaagctgtcactggccagacgtggagtggcttcctgccctaagctggcaggctgtcctgcctcacatgccagagccaagaccggcaaaccccagctgtcagggcagggaagtgggcaagggggcagcaagctgctggtgtctatgccttgactccgagataaatagatgacctaacagtggccaacttttgcctctcacctttctgacggtgaaatggaatcgagccccagacctgaccagggtacagtaaaaggtcttcctttaaacacaaggagcagctgttttatttcattagttttataggcacctcctctgaggccaagaattagaaactcatccctgcgtggggagtggatttttccgttctcccccagctcctccacacatgaagcagccagctgtgttccacgggggcaccatgacttgtcagcctccggatgtggaattttgggagcccaggcaatggttgcctggataccagtcgtgtgactgttggaaatgatctgggagggccgggagggccggagcaggcatttaagagtcagacaaagagaaagcgggatgctaacaccagagcagacaggtctggcaggcgtgcctctgccaccagacagttcctttttgctcttgtcaggaaggtgccaagtgactgctggctgaccgtccctagaccccacttcagctgtgtcaccagtttccccaggcatctgtcatcccaggtattctcaagcaggctctgggggcgtgtcagtgacggagggtgggagggtgcccaggaggtcaggcccgtctgcctcagccccctttggtggcctctccctgatctggtcatggcccctgcccttgagacaccaactagacggtcctgaagaaatagtcccgagctcttgccaggatttgcctcccatgcccatgcccttgccctgcctctgccctggcagaaggagccgccctcccttacccgcctcgtggcttccctttagggttccagtctctgagagggagagggagagctgctgagggaacagaagccactcctagttgctgttcctgggaacccaagtgggtgccaagaatgcagcgagggaattagggcctcgaggggcacccaaggttgggggccggcagggccatggcgcggatcctccatccagctctgccttctgcagccactggggcttggggtttcctttcctttgacctcagggcacccggcccagctcaacctggccttgctgcttcactactgctgggagtagccatctgcgctgatttctcactccaccaaccccaccccgacagagtctcactctgtcgtccgggctggagtgcagtggcgcgatctcggctcactgcaacctccacctcccaggttcaagcgattctcctgcctcaacctcccgagtagctgagattacaggcgcctgccaccacgcccagctaatttttgtattttcagtagagacggggtttcgccatcttggccagactggtctcaaactcctgacctcaagtgatccacccgcctcagcatcctagagtgctgggattacaggcgtgagccaccatgcccattttaaagtgtatgattcagtggtttttagtatgttcatggtgttgtgcaggcctcgccaccatctaattccagagtattttcatcaccccaaaggaaaccctgcacccattagcagtctaatcccatcccctggcaatcattaatctaatttcttttctgtagatttgcctattttgggcattttgtataaatggaatcatacaatacatcctctttttttttgagacagagttttgctcttgtcacccaggctggagtgcagtagcgcaatctcggctcactgcaacctctgcctcccgggttcgatggattatcctgcctcagcctcctgagtagctgggattacaggtgcctgccaccacacctggctgatttttatatttttagtaaagacagggttttgccatattggccaggctggtctcaaactcctgacctcagggttcagcctcctgagtagctgagattacaggtgtgtctagaactcctgacctcaggtgatccactcgcctcggcctcccaaagtgttgggattacaggcatgagacaccgtgcctggcccatgctcttttctgtcaggttttgtttgtttgtttttttgtttgtttctgagacagagtctcactctgtcactcaggctggagtgcagtggcacgatctctgctcactgcaacctccaccttccgggttcaaacgattctcctgcctcagcctcctgtgtagctgggattacaggcacccgccaccgtgccaactgatttttgtatttttagtagagacagggtttcaccatgttgcccaggctggtctcgaaccactgacctcaagtgatccgcccacctcggcttcccagagtgttgggattacaggcgtaagccactgcacccggcctgtcaggtttgtttcacttagcatgatgttttcaaggtttgtccctgcagcagcatgtatcagtccgccattcttttttatggctaagatcccactgtatggctatacggtattttatcagtgcatccactgtcgggtttttccccttgtggactattatgaatagtggacgcttgtgtgcaagctttgtgtgaacacctgttttcagttctcttgggtatgttcctaggaatggggaggggctttagatttacgaaggaagacaaggcaaagagagggagggaggagggacagagggcgagagaggggtaaaagaaaagagggaaagggaagggaggcagtgatgggcccggaatggtgcttcagagccagattgtgaagtcttgctaaggcatttggacctgattctttctgccccagagaatcttggaagggtttgcctcccaccccctgtgcctcaccctgaccacccaacaaggaccaacttaagaggagtcccaggtgcagcctcagtacctggtagcatgtagcaaaggggtggtttgaggggagaggggctcaggggaggggcctgggtctgttggggcaggtcgggaggaagaggggcaccaagtgggccattggaatactggaagcagcactccagtgagacatgggcgttggaggggtagatgtgggagtcactgcagtcaaaagccacagaactgggtgctgggagggtggccgagagatggatgggcaacatccgcaccatggagaggactctggccagcacttgcacttagcatcactgatcaacaaggcaaaagggtgggactggcctgggggcaggggagggaagagggatggcaacagagaggtgctgggatttctggctaaagagaccagaagacacccatggttgttcatggcaagactcccagctgcattcaggcatttgggaccttctgtcaccgtcattggtcattctgggtcttcagtccccaagcgaccatgcctactgctgctttcgtgggtcagccctggaaatgcccaggggcctaggggctggcctgccctcagacccagctggactgccgctggctctgaattcctccatcctgccccgcctcttcccggggctctaggctcctccccacccagagcctgcctgacagctgaggccctgcagctgcccaggcmaaggggcccctgggaggtctcagggacagctgctgcccataaccttgctgaccctggcccctgcacactgctccctgagatcccaggcttctgcccagcagccagcaggaccctaccaagccccatcttctctgctcactcccatcgctcccagatcttcccaggggctgaagcattttgggctgagcattttcgtgctgagtcagcaggccccacccaaagagtgagaaaagctgctgggtagaggcacccctagccccgctcctgcttcagaggaagtgcctttcaggggtggatgaggggtacacctgcctccgtcaggcaggcttggccctgttcaacagggtggggaccctgccctcccaccacctgcctcctaccacagaacagggcacaagggtggcacaaggggaaaaaggagaaggcaccatcactcctgattcccagcgaatagggggaaaaggcatactcactcctgattcctggcagcttcttcccttgaaggtccactttcctcctgaggactcgaggccccttcaaattgccccttagaatgtttctagtaatagtagttgcctctggggacgggtgtccaagggctaggggtcaggagtaggagggctcagagaacgatttgtcatgtccacactcaacctgtttgaatttttttttttatttttttggagacagagtctcactctgtcgcccagtctaagtgctgtggtgccatcacagctcgctgcagcctcaacctcccaggctcaagtgatcctcttgcatccgcctcctgagtagctgggaccacaggtgtgcgccaccacacccagctaatttttgagtttttgatagagacagtttcgccacgttgcccaggccagttcaagcaatcctcctgcctgagcctcccaaattgttgggactacaggcatgaaccaccacacccagctgtgtttgaaattttttaccatgtgtctggattactttaaaagaaggtgggggccaggcgcggtggctgacgcctgtaatcccagcactttgggaggccgaggcgggtggatcatgaggtcaggagatcaagaccatcctggctaacacggtgaaaccccgtctctactaaaaacacaaaaaattggccgggcatggtggcaggcacctgtagtcccagctactcaggaggctgagtcaggagaatggcgtgaacccgggaggtggagcttgcagtaagcggagatcgcaccactgcactccagcctgggcaacggagtgagactctgtctccaaaaaaaaaaaaaaaaaaaccgaagaaggtggggatgggcacagtggctcatgcttataatcccagcaatttgggaggctgaggcaggaagatcacttgagcccaggcagtggagattgcagtgagctgacattgtgccactgcgctccagcctgggcgatagagcaagactcagtctcaaaaaaaaagagggggtagagtggtgggaatagacatatacaaatgtttatatgtcgatccagctttctgtaagcactccacaccccacagctgttgtagcatccacctccttgggaggcaggctctcagaatccctgctccctgagggcagggagtgtcatgttcactgttgtctcactggtccctagacagtgcttggcacatagtaggcccacaaagaaactcctgcagaagcagtgccctcctatgacatgcctctccaccttccagaagcaggcag

SEQ ID NO: 94650 - DNA, 13649 bp, Homo sapiens
ggctgtaccattttatattcccaccaacaatatattgagggttcccactttcctatgccctcactgacgcttagtgtgctttgcttttttcactcaacattatttcatagatatgtttccatgttcacttggttatcatttttaatggttacacagcgttccaaatcagttagttggatattatttaaaaattactttaaagctcaggacttggattgttttcattttgtgccattataaatagtggtactagaatcttcactgcttactacatttttcctttagcttatgtccttgaggtatgttccaaagtggaacaaagggcacatacagctcatgtactgcttccctggttagtctgcagaagagttgactgtacctaaaatgctatcagcaaagtttgcacttgccttcctctccacagcctctgccaacataaggctttgttgctttatttgtgtatattaatgatatagttactgtattagtctgttctcacactgctaataaagacatacttgagactggataatttataaagaaaagaggtttaattgactcacagttccacatggctggggaggcctcataatcatggcagaaggcaaaggagaagcaaagtcatgtcttacatggtagcaggtaagagagtttgtgtaggggaacgcccatttataaaaccatcagatctcatgaaacttactctctcccatgagaacagtatgggggaaaccatccccatgattcagttatctccatctggcccggcccttgacacatggggattattacaattcaagatgagatttgggtggtgactgagccaaaccatatcaggtataggtacatgatagaatcttattttttatttttattttgagacagaatctcactctgttgcccaggctcaagtgcagtggcacgatcttggctcactgcaaccacttcctcctgggttcaagtgattatcctgcctcaacctccccagtagctgggaattacaggcatgcacaaccacatccagctaatttttgtattttttagtagaaatgaggtttcagcatgttggccaggttggtctcaaactcctggtctcaggtgatctgcctgcctcggcctcccaaagtgctgggattacatgtgtgagccaccacacctggcctgaatcttaacaatcttaggctgtttcgatttgtatttctttcattgttggtgaactcacaatattttaacagccatcagctgttactctaagccatccatccaaaaaagccaagcagtgcaggagaatctagggccatagcaaaaggcagaagatggagcttaaagaaattccctgggtttgggcagggcgtagtggctcacgcctgtagtcccaatactttgggaagccaaggaggggagatcacccgaggtcaggatgatctcaggtcaggttcgagatggtgaaacctcatctctactaaaaatacaaaaattagcctgggcgtggtgtcaggcacctataatctcagctacttaggaggctgaggcacaagaatagcttgaacccaggaggcgaaggctgcagtgagctaagatcgcaccactgcactccagcctgggcgacagagtgagactctgtctttaaaaaaaaaaaaattccctgggtctgggagcaggctcaggaggtatgtttgatagcgtgactgcagcctcagctgtagatgaagaggacactggtaatgatgctgaactgatttagacatcatatccttttccacgttctcctttcatttggcacttctcctggttctgcttctccctccctggccattccttctaagcctcctttcagcatttctttccttctacctgcttcttatacatcggtattaaatataggatttcattattggatccttcttttttaacttaatactctgggcaatctcattcacccccatggcggtaatgacaatttaaatgctgaaaattcccaaatatgtattgccagcctagactacgctcttgaattccagaagcacatatctagtttccaactgtatatctccatttgaatgtcctctaggcaccttgagtccagtatcttcccctccgatcactcctttttttccccatatgccctacctgtatgactgtagcaacatcaacccagtcactgaagccagaaatgtggaaggcactccaaactctttcttctgcacctacatattcctaaatgtgcaccttcttctccctaaacctattacacgaatttgattaatgtttcaaccatttctcccaataactctagcattgttacatgtattagggttctattggttgcaactcgttgcttcagaagggaatggaagaagatttattggatgtatacttgtgtggaatgaaaggagaaactgagaaatcattgtggagaggcaggcttcagagtggctccggggacctcagcagcaagcaggttgctctgggccttctctggagagtctcctacgaatagacttggttccaacaatgcttagcctctgcatctcttggatcaaagttccaaatttctagggaaatctggggaccaacaaagattaagaagtttaggaagtttgagtcatgtgatggggacacagctctggaggatgacttctatgtattagaggcaaatatcaaagaaaaaagagacggcatgagatggacagtctttccagaaattgtctatgacattgccacagtttctgaactggtcttcttgcctctggtcttacatttcaccaacccacattgtgcattctcttccaaaatacaagtctgagagaaaaaaaaaaagaaaactataggcgtgaaatccttcttcatctcttactaagtcttggactttgagcaacagcaactaccatctgagtccctctgatctgctagcactgtgtcagtactttacatatgttatattcatgaccactctgcagggcagatattgtaattactgtgcaaaagaagaaagtgaggcttggaaggaattagtaagcttgtcctaggggccctgactggcaagtagcagaatttacctgattcaaggcatttattaatggattatactccttctctgagatttgcagtctcttggtttataaagtgagtataacttttttgtttttcaggattaatgttagaattaggcaatactggctacataatttgtgaggcccagtgcaaaatgaaaatgcaggatggccccttgtaaagtaattattaaaaatttcaagagagcaacagcagggcattaaactcagtatggggctctgtttttgggaggcaccaaacacccaaaccatatcaggatgtgaaaccatctttgggggaccattattcagcctacacaataacaatattcttattcttattattttgttgtccttatttcatgcttcagtggtttcagaataaagttcaaactcttttccaggacatggctagcccattgtgatctgacccatgcctatcattctaatttcaattctttctatccccccacatgcattgaacactccagtaacattgaacaacttgtgatttttccactgcaatctgctgtcacttgctgaccagcctctttcatactgttatttctgcacagaatattctcccccatttccccttttcaccattcttcttctctttcagttctgtctgattttattgttgttgtttttaatacttagcccaggttttctccttggaaaacttctctccaccacttatgatcttggaaaagtttcttctctattttcacatctaaagaatgaaaatcacagaataacacctgcattattatgaggctcaaatgacataatccacataaagcacttggcagactgcctgccaggtggtaagtgcccacaaaaaaattatctgtaattatcgtaaatattctttgaccttcccccatggtgatataagagctttctcctctgtcctctactagcaaccagagcatagaaggtggcaggctttcctgtaatttactgctcatgtgtaagtctgttctgctgtactgaccattctttgagatcaagagctcaattgttcatttccatatctttagtgcctagcacagggtttggacatatggcaagttaatacttattgaagcaaaatagggaaataattattaagaggacacatgctaattctgttctcagaatattttttaaaacattcattccattcttatgttcctgcagtacaagtctaaaaatatttcatttgtctaccttctatttaaataaaagtgcagcattaacaaaacctaccctgttgagccaaatttccttttgtcttgctttgctctagtcacttcctcttttttttctttctacttcctcctggtaaaggtcatttctttctgtgtcataatctcacctttttttttaaaaaaataatgtcaatgtttttcccaaaatatgcattcccagaaagctgcgtagtcgttacccgtaacaaggaaaaccccacccttcctgtcccccgctgtgctgcagcccttgaagtctccagggtatctgtaaccttagcatggagtcagtatgagctccctctcctggcaggttatagtcatgctaaagctagacacggctagagtatcccagtcacacatccagaaatgattataaagcatgagataacccaggcctttctgttccctgagctcagatttaaggcaggtgtggggctatctaatttgtttgtaaaatcattcgcttgacaggcatcacagagatctgaatcccatcctactgcttggaggaaagaagctgcaccgtttatgaaaagaataagaatttggatttgtgccctgttctaccacttatctagctggctgctcttttgtcaaattactaatacctgcaagcctctggatcttcaactttagggtaacattagacctatttcacctaccttatagggtagatgtaaattttaaaaacaatataaaaacggtgctacttattgggtaatagctatgcttcaggcactgataggtgcattatccctattttgtatatgagaaaaccacagttcaagcagttgtcacatagtaactctgttaacacatggagagccaggattcatacccaggtctttctgactcaaaagcctttcttgatgttttccctttaattataccagactaatgttcctgaatcatgcatctgaaaacatttgggggaaaacaaaagtaaaattctatactacgaaggtaaatttttattttatagatgttgaaattgaggcccagagaagcgcagtaactttccctaggagttggtggcaaatacaactcagtagttgattaaggactcaatagtatttacccaatagggctagcaagtgtgcaggctactcgggtgttaaaatgtagctgcacccaggtgaaagggcaatccaataaaggtttcaggtactttacactttttttcacatgctttccacttcatggttgcactggacagcttaggtgatacaatctcaatgatactgtccagatcacgaaggtttcctgagtccttgttgtgaaacacaggaggccctctgtgtgacttggtcccagcatcaatttccagcttcatctctcattaggtctcctgggtcatcatctagctccaaacctcctcctcagtcataatgaactgcttgcagctcctggaatgcatcacatggatttgtgcctcagaacctccattcctttacctagaatatatttcacccgctgagcatctacttattttccaagactctgtttaaatgtcactttttggatacagtcttatttgatctcctaccacccctccccacttgagatagaattaaccattctctcctttgggcctctaatatctcctcttcatatttttaattgggacatataatgtttttattgcaccaatatgcaataaaactggtttgtttgcacttctgtttgttaacaccttaagaataaggaccatcttgagatggcggccaccgagggggtcggggaggctgcgcaaggcggtgagccccggcagctggagcagcccccgccccagccgcacccaccgctgccccaggagcagcacgaggaagagatggcagcagaggctggggaagccgtggcgtcccccatggacgacgggtttctgagcctggattcgccctccyatgtcccgtacagggacagaacagaatgggctgatacagatccagtgccgcagaatgatggccccaatcccgtggtccagatcatttatagtgacaaatttagagatgtttgattacttccgagctgtcctgcagcatgaagaaagaagcgaacgaggttttaagctaacccgggatgctgttgagttaaatgcagccaattatacagtgtgacatttccggagagttctcttaaagtcacttcagaaggatctacatgaggaaatgaactacatcactgaaataattgaggggcagcccaaaaactatctagtttgtcacaataggcgagtaatagtggaatggctaagagatccatctcaggagcctgaatttattgataatattcttaatcaggatgcaaagaattatcatgcctggcagcatcgacaatgggttattcaggaatttaaactttgggataatgagctgcagtatgtggaccaacttctcaaagaggatgtgagaaataactctgtctggaaccgaagatattttgttatttccaacaccactggctacaatgattgtgctgtattggagagagaagtccaatacactctggaaatgattcaactagtaccacataatagttcatggaactatttgaaaggaattttgcaggatcgtggtctttccaaatatcctaatctgttaaatcaattacttgatttacaaccaagtcatagttccccctacctaattgcctttcttgtgggtatctatgaagacatgctagaaaaccagtgtgtcaataaggaagacattcttaataatgcattagggttatgtgaaatcctagctaaagaaaaggacatgataagaaaggaatattggagataaattggaagatcctttcaaagcaaacacagcacagaaaatgactcaccaacaaatgtacagcaataacaccacccagaagaacttgatggaatgctttgatattttattaagggactctgcaggagtttaaaatgagggtgatccttccctttgcctgtggcgtaaaaatgcatcacacaggtattgctttttaacaagaactgacgctccttgggtgctgctgctactcagactagctctaagccatgtgattgttctaaagcaaagtcattgcatgggaagaggaagaaaaagtcccataaacgaacttttgtagtcttatcaacatgtaatcaaatcccttagcatcagctcctccctcagcggtacacgcgtcaagatttgtagcagtaataactgcaggtcacttgtatgtaatggatatgaggtagctgaagtttggttcagtaagcagggaatacagtggttccatcagagccagtctgcacactcacattatcttgctatcactgtaactaactaatgccaaaagaacagttttgtaataaaattatagctgtatctaaaaacaaaaaacaaacaaacaaacaaaaacaataaggactatcttgtttgtcattgcatctttagtcttcagtattctgagcacttaggggcagagcatgatgaccggctaacccaacaactacacccaactaatcttttgcctgcttccactataaaagccagaaaaaaaagaatcatttttcccaacctcccttgcaaccattagacactacacacacaaaaaagctctgcccaataacatctgagcaaagatcttagggagaagcagactgcttctaagagcacttatgcaattctgataaaagggtcagagtgactgatacaaaccgtctccctttccttctgtcttgaatacaaacatgatgcttgagttggagtagtgccatcttgcaaccatgaaggaaaagcccaaaaggccactgagccacccaacaaatgcagctgctgcatttatgttacatgagaaaattgtaccatcgccgattcaatctgctgtgtttgggtcatctgttacttgcacctgagaacattcctaagtaacttataaattaataatttttgtcacttaaaaacaggtaatttttttatttcaaatattttcaaatgtttagtcccagaaacttctcctcaagaggaattttaaactaagccgaataaataatgttgatcaaaggagaggtgttctcactgaagaggaaaggagattgctgtgtggactaccagcccttttcttactcccttgttttccccagtagctcctgaagcacatatttaaaacttctatggcttctctgaatactgaactactctctaacacttgatgggagtgtaaacttgaacagccttttttgtgcacagtttggcagtttgaggacaattcctatcatgttgttaaattatgtaatctttgactcagcaattccatttctaagaatccagccacagatatactggcattgttgtacagagatatgtatatatatacagaaggtggttcattacagaattgcctaaaggttaaaaaaagaaagaaaaattttaaaaaacaacatagatgtccaataaggaactcattagttactttatagcacattcatcctctggcatattctgcacccattactgacattgaaaggtctccaggatatagtaaagtaatatacctttaacatatatttaaaaagtaactcataaaatactattaaaagaaaaatcaaatgagtacataaaaatatacatatgtaggtatgttaatgcatagaaacatgtcttgaatgaagacaatgttaacagtgattacttttgggtagtgggattgagagagagagagagaacttcaactttttactttgtaaaccagtatattgtttcaaaaattggcatgtatttatttttcttaggtaaaaaatagagaatagtaccttgccaaagaagataaactgatgataaataagcacataaaaagatgctcaacattatatgtcatcagggtattgcaaatttaaaaaacagtgagctactaccacctattagaatggcaaaaatccaagacactgatagtaccaaatgctggtgaggatatgcagaaacaagaaagctcattcattgctggtggaaatgcaaaatggcaaagccaccttggaagatagcttggcagtttctcacaaaaccaaacatgtttttactatatgatccagcaattatgcttcatggtatttaatcaaataagttgaaaactcatgtctacacaaaaacctgcacacaaatgtttatagcagcgttattcataattgacaaaactaggaagtaaccaaggtgttcttcagtaggtgaactggtaaataaaccatggtacattcagaggatggaatgttttttagcactaaaaagaaatgagctatcaagcatgaaaagagtggcattctctctattctccatgaaaagacataaaggaaacttaaatccatataattatactaagtgaaagaagacaactggaaatggctccatactttatgattccagctatatgacattctggaaaagacaaaactacagagacagtaaaaaagatcactggttgccaggggttagcaggaatggagggatgaataggcagaacacagagaatctttagaacagtgaaactactttgtatgatatagtggtggatacttgtcattatacatttgtcataacccatccatatacatatagcaccaagagtgaagcctaatataaactatggacttcgggtggtaacaatgtgtcaatgtaggttcattcattgtaataaatgtaccactctgaggcagaatgttgattgtgggagagaccatgtgtgtgttggggcagaggatacataggaactctctggactttccacttaattttgctgtgaacctaaaactgctctaaaaaatagtttgtttaaaaaatagaaacaacaattcaagacttagcccaacatattttattttattaatttttttttaaggcagacagggtctttctctgttacctaggctagagtgcagtggtgggatcatagcttactgtaaccttgaactcctgggctcaagcaatccttctgcctcagcctcccaaatatctgggactacaggtgcatgccaccatgcccagctagttttttattttagttttattttttgtggagacaggcttttgctatgttgcccaggctgatcttgaactcctggcctcaagtgatccccctgcctcagctttccaaagcactgggattacagatgtgagtcaccatgcctggcctagcccaacatgtttattcaacaggatggactaggtcctgtgagggtacagtgaaaattaagacatagtcccttttctcaaggtgcttgaatataatacagcgaagttttaaaactataccatactataaagcagattttttaaaaagtgctgtaagaaaaacacaagtaactgattatgagagtctagagaaaggaatgagttcctctgttctgattaggggggatatgagaatacttcactgcagcagaagcatgtgagttggatctcaaaacataaatacattcttgtcagtcagatagagtgggaagggaacaggaagagcactctaggcagagggaacagcacaaggaggcctgaaagtgtatattatatgtgaggaattgtggctgcctggatggctatcatgtaagataagtaaagggataccttgggaaataaaactggacacgaaaagtggggtaaaagcatgcaatatcctttatactccatgctaagctgtttatattaacaaaatatagggagttagcacaggtaggccaagtcaatcactggtagattagatctgttgtcctgcagccaggacaggagttaagaggcataggcctctgtccaggggcctgggccagggttcaagagggataggttctgatgagcccacactctgaagcctgcaatgggagcaccaaatacttgaactcctgggctaaagcaatccttctgcctcaggaggattatggggttgcgccaacagccaattaagggcatcttagcaccttttggatctgagcagctctggcctccctgctcagcccctctggctggcaagaccttctataattagaaatcatgctttcttatgcttggtgtccccttttagggtcatcttctctagctagacagaggagccttgtggggatattggtaaggatccattttcttcttcctatacccgctgttctaggagttgggtaggaacatgtccctattgacctacctctcttgaaccacctataattcaaccaaggagtttgtactctggaaccttcctcatttctcttgattctggttttctaagctcctgacattaaattactctcttattttttctccttggtttgatttgtgttcctggctctgattcccaattattccaaaacatattagtttaatggtttggccctacattaaaccttactgtgaacgacagccttaaatgccccctcaataagggctttttatctaatatagaccctgcatcacatcattgcacctaagctgcctatgatctaatcaaggatacatgatttttaaacactaaacaaaatataaggttgaataggattaaactgtaaaacatcttgcagttaacaaagaaaaggcagtaaaatgcagtgggaaagaaaatgcattcgagacatctggattctagttttatttgtcactaactggttgcaggactaaccaagtctctcaacctcaactataaaattgaaggattgttctatatgacttctcagagaactttaaactctgtgactagtgctatgtgggtagagaaagggagggatctctttgggtgggatttgttgagtaagtcttctgggaaaagaggaaaagggatataaggtgagctttaaagatgtgtgggattttttactgggaagatgaaagtgagagcacttgcagagttggaggtaaaaatgttggtaaaataaggaaggaggaatgagcagaatggctcacggcacagcaaacacctaacacgccagcctgagcacagcagctggtaagcagtgggagaggcctggaggggcaggctatggtgaatgctgttggacacaggctgaggggtcacagaggatctttgtggagagaagattagtctggaaagagtgggcaggatggaggggtgggagaatatattggagaggaggagaggagtttatgaccatggtccagttatgagttaaatacatttggactagggtagctgagatgtgagtagagaaagtggtaaatctgagaggcattttgaagcagagattgaataaagaggaataaggaggaagtgatctaagttaactagcaaagcttgaggggagattttgttaacaggaaggggaaaggaatttttttgggggaggtttggtcttctagggagtttcattgtttcattcttagacatgaacatgtgtgaacagttgtactgggagtcttttaaaatatgtacatttttgtaggcagttagaaatgtgaatattattgtcaaaacagatagatgagtttctaagtgttcacactgaggcagtagttgaaactgtaaaagcagatgctgtgtatgaagaagaatattacaaagagaaagacatacaataattagaagaaagaaattattacacattttataatgcttaactatttagctttacattttatttctaacttaaatccaactcttatagtactcctttgacctgtcctacaaatttatctctctcaatctttttttttgcataaatattagcaatcttttccttttctttgtgggtaactgtattagtaaagacaggttagcttatactaacactccaaatctcagtggctgcaaggtatttctcatacactctacatatctgtcacttcccctcacattttattggccaatgcaagccacacagccatataaatcctcaaaggaggtggcagtttgatcccccagtgtacattaatgggaagagtgggactatttgtgaaaagttctaatgataaccatagtaacacacttttttccttagaccgttatctacaaccatgcctcctccacctttttatttgtaccgtcactaaaacgttttcagtatgaacgttttataagcagcagtatggtggcataattctgtggcataattccaagttgtttctgcttctttgctcttttctccttattttgatgctgtcttcctttggttccatgacaggctctcttcttttcttcctttccctattcttagaactgaagagactcaaggaaatgctacaacggaatcaaaacaattttattttattttttgagacggagtctccctctgtcgcccaggctggagtgcagtggcgcgatctccgctcaccgcaagctccgcctcccgggttcacaccattctcctgcctcagcctccgcaggcgcccgccaccacgccctgctaattttttgtatt

SEQ ID NO: 94651 - DNA, 14340 bp, Homo sapiens
agctgctaacttcctgtggctccagcagctggcccgtgctgcccgtggagaacttatgaagtggtctggtgttacctgcattttacagatggggaaatggaggctcagagaggtgaagtggctgggccaaggtcacacagctcctaagtggtgggttcttttttttttttttttttttcggagacagaatcttcgctctgtcgcgcaggctggagtgcagtggcgcgagctcggctcactgcaacctccgcctcccgggttcaaatgattctcctgcctcagcctcctgagtagctgggattacaggcacctgccaccatgcccagctaatttttctgtttttagtacaggcagggtttcaccgtgtgggccaggctggtctcgaactcctgacctcgggtgatgcccccccccccccccgtctcggcctcccagagtgctgggattacaggcatgagccactgtgcctggctgctaagtgatgggttcttgactgcaggccagcagggcctccgtggcgtcttgggccgggaggcagatgctggtgtgttcgggggttcccagctcacccacctctgcccacagctccctacaccatcatcaccttccccttcctgtttgctgtgatgttcggggatgtgggccacgggctgctcatgttcctcttcgccctggccatggtccttgcggagaaccgaccggctgtgaaggccgcgcagaacgaggtgaggggcggggctggggtcctgatgagggtagcagggccaggcagcccctcaccacaccactgcccccccagatctggcagactttcttcaggggccgctacctgctcctgcttatgggcctgttctccatctacaccggcttcatctacaacgagtgcttcagtcgcgccaccagcatcttcccctcgggctggagtgtggccgccatggccaaccagtctggctggaggtgaggcccgggccccagcccggctgggggccccgcagcacccgcagccctgaccgccctcccctgcgttgccgcagtgatgcattcctggcccagcacacgatgcttaccctggatcccaacgtcaccggtgtcttcctgggaccctacccctttggcatcgatcctgtgagtcctgggatggagtgtccgtgggtggtgaaggcagctgggagtgggggctggggctcccctcggttcagccgtcctgcagcgctgtcgctgagcactcctgtgtgccaggccctttcctcagcacaagaggcagacaagcctcctgccctgcggagcctgcatcacagtcccctgagtgtgcggaggcaaagcgagaccagccaggaaccagtctcctgagtgtgcagaggcaaagcgagactggacaggaaccagcctgcagcttgcactgtgccaagcactgttcccaaccctctgtggaagtgattttcttttttcttttttttatttttggatatagagtctcattctgttgcccaggctggagtgcagtggtgtgatcttggctcactgcaacctccatctcccgggttcaagcgattcccctgcttcagcctcctgagtagctgggattacaggcgcccgccaccatgcctggctaatttctgtatttttagtagagacagggtttcaccatgttggctaggctggtctcgaactcctgacctcatgtgatccacctgcttcagcctctcgaagtgctgggattacaggcgtgagtcaccgcgcccagcctgattttctatttgaacctcgtaacaaccccgtgggcctcacattagtagtgtcctcacctaaagaagagactgaggcacagaggtcatgcccaaggtcacccaggctggcaccgtggcagctggcccatctgcgctctgttgcccctcggtgggtgggtgatggatgaggctgcaggctccgagggggaaaacagggtggtgagagagtgactcgggccggggacttcctggcagtgatggcgagggagcccctgagtccagcccacccctgctgccaccctagatttggagcctggctgccaaccacttgagcttcctcaactccttcaagatgaagatgtccgtcatcctgggcgtcgtgcacatggcctttggggtggtcctcggagtcttcaaccacgtgtgagggccaaggctgcccgggggacgggaggctggcaggccagagtgggccccagtgagcacacctccctcttgcccgccaggcactttggccagaggcaccggctgctgctggagacgctgccggagctcaccttcctgctgggactcttcggttacctcgtgttcctagtcatctacaagtggctgtgtgtctgggctgccagggccgcctcggcccccagcatcctcatccacttcatcaacatgttcctcttctcccacagccccagcaacaggctgctctacccccggcaggtgggctgcggctggtgggggccgggctcacacggcctcatggggaccccgcggtcacagggccactgggagctgcaagatcctcgtccgagaaacggggatgcaggccccgggccgtgcagacagggccgtcagaggtgatggtgtgcatctttagcaggtggcacaactggcactgggaaccgggggtcccttccctcaggagtccttatggaggcagaccctcacccagtgagggcacggagcccccgggggccctggagggaggagcgaccgcaggctctctgggccccgtgactgctgtgactcaggttcctttgcaggtgtgcacagcagggacgccctgactctcgccctctccctggcaggaggtggtccaggccacgctggtggtcctggccttggccatggtgcccatcctgctgcttggcacacccctgcacctgctgcaccgccaccgccgccgcctgcggaggaggcccgctgaccgacaggtgggaccggggcctaaggtgtggggggctgcttgcggggagaggccactgtccggtgtgtccctgactcctcgcttcctgacagactcctgagtggccaggagcaggcctggcgggtggtgggggacctcctggggctggagtgctgccaacactgcctgctcatgccccaggaggaaaacaaggccgggttgctggacctgcctgacgcatctgtgaatggctggagctccgatgaggaaaaggcagggggcctggatgatgaagaggaggccgaggtgggtgcagtgccttcctgggggtgggacggctgaggccctgccggccctcactgcacccgccccgcagctcgtcccctccgaggtgctcatgcaccaggccatccacaccatcgagttctgcctgggctgcgtctccaacaccgcctcctacctgcgcctgtgggccctgagcctggcccacgcccgtgagtgacctggccaccgacggctggccccagctcctggcttctcacataccgctgctggctgggcgggttgcttctctctgggcctcagtttcccctctgtaaagtgggactgtccaaggaggtccctcgctggccccccgtgcagggagggcttcaggctgcggcaggtaggtagggggctggcaggcacccacttgccgttggcccccactgtctcctttgcttgcagagctgtccgaggttctgtgggccatggtgatgcgcataggcctgggcctgggccgggaggtgggcgtggcggctgtggtgctggtccccatctttgccgcctttgccgtgatgaccgtggctatcctgctggtgatggagggactctcagccttcctgcacgccctgcggctgcactggtgagcgaccacccactggcctgggctgctcaaggcgtgagttcccctcaccaacccctctgcttctcacccccagggtggaattccagaacaagttctactcaggcacgggctacaagctgagtcccttcaccttcgctgccacagatgactagggcccactgcaggtcctgccagacctccttcctgacctctgaggcaggagaggaataaagacggtccgccctggcagtgatgtctcgtctctcttccctcctttttagctgaggcaggtggcagggtagaaggcatggtgtaggatctgggacctcaaaagtcaaggcctggacctgagcagatctgcaataatgtcagactcttggggtgaaaaggggcagaaaagggccaaggagagatgtttccagcacattctaacttggagtgagcaaatgtcttcccaggccgggtcaggggagtgagctccccatccttggaggtgtgcacctggctgtgagcgggtgtctgggttactctctgttgggagtggtgccaatatccatgccctggtgccgggcctcaggggtctggaagtacagagcagtgtggggcacctgagccccggccagtgctccatgcagggccatggtgtcacacgcccaaggccacacacctgccaggaagggtagaggctgtccccagcagcagacattacccaggaccccggggttcagaacaggggctgagcctgactccaggcccagcctcccctcacctgagactacagtcttcctgatccctcccaggtggtccttcctgcgttgctggcagaatgggggtggctttctgcagttccctctggcctgggtcccacccccactgggaggcagaggaagtgcttcccagaagccaacaagctgcaaagtggttcttcccacagctgtggctgaggccagctgctgggaggagcctgtccattggctcctggactgctttgctcaggacctctggatgccaggggtcgtatcaggggctctaaggtaattccacatgcccagcagattcagcttagagaaacggtgctcacagtgctggggtaggagcagagaaggctaaatgaaggactccggagagctgcaggtggatctggaccaaatccagaacccaacgccttactccctcctggggagagagctgggcagagacttggggcgggcagtgaggtggggataggtgagcagcactcgtggtgagtggccccagtgtgatttaggaggggtgcagtgtgggatcccagggacatgaccagtcagccccgccctggctttgacatgggggtgcctggcagtggtggctagagaagtccagtttgccaagagaatggcacataaggcactggggtgggcacctctggggcatggacatagggagacatagggatggggtgggtcacctgcgtggaggactgggcactgaacagcacaggcccgagcccatccttgtccacgtgagcttatggcctgatgtagagaccaccaggggctccaggaaagttaagctgcatggagagaaacgatgggccagggccgggcccagggtggtttagggaatggcagtgtcctgggtagaataggaaggcctgagactgtgactgagctgacagtggggcaaagtgaaggagcccagtattggaagatcggctccacatgtatctctgcgaggagactgcaagcgagctcgtgtggaccaggcagaggcgagggctgagtgaggccagcagtggcctgggcacaggaagacggtgagtgagaagccactggagctcctgtgcaggagcgcaacacctttactgcttcattcagtttggcttcacctgcttaaaactgtaactctctagaaggctgaacagcaaaagcctccctcctgcccagccgctcagcatccccaggcaccagcactgctcccagtctccaacgtcctccagggctcttcgcttctgggctagaagcagggaaaccagagtgtgctggggaagaagaggaggaggtggaggagggctgatgatggggccacatgctgctgggatgccagctgagagcagcggagcactgctaagctaaggggctgagtgggtgcagatggagccctccgtgggctccttcaggtaccaggagccctgcctgagattcaggacacatccaagggtgacagcttgaggttgggttttwatttttttatttgtatagtacaatctctgtggtagcagaaatatatgcacaaaaaacaattcaaataagagttcagagtaaaaaaaagtcagctaagactgtatcccgcaggacatttcatatatatggatttcacagctacactcgatccacgccccacaccacatacaggctgctgtctcccacaagaatgatgatgtcaggggcatcaggaaaggtaagggccgggaaaccgggcccttggagaaccctgcccaggggaggcccagcctactcacaggatccgacactccaggcagagcagagggcaggagaggcccaaagagctaggtcaagcagctggctcccctgggaggggagccgggagacagggaggtcctcacactgcccccgtggccacgcatggctgtctgcacactccatcaggaggaagggcaggggagaagtcacatgcagtacagtgaaactcatcagtgtcacacacgcccagcaggaggggagagctctgctccacacgctggcggccttggctgctccagagcaatccgctgctccagcttcagccatgggaccaagagggtaaaggagcagcttctggaggccccaggcagaggccaccttgcagcagtgactggcgactttgcagtacatctctgctcacttgctgtcccttgggagtgagcaccgtctataacacatcrccatctacaaaagcctggtcacagtgttcaccagcacattcatgaaaatttaaatcaacattaaccaaagtacctgcaagtaacactgcttactcttgctgtttgcctcatctgactggaaaccttagcccccaaatatgaaatgccttctctagattaaaaggattcagagatgttgcactattgcactatatttctgcttcccgatctcgtttctgagtcctagtgaaatcgtaaacaagagatgaaataaacgtcgctccattttaataccgtctttagtatcatacacatgtgttcagtagtgagccacccaaagcctcctgccacaggagcagtagtcgaagcacagaggggaccccgctctgctgcctccccatgcagtccagtgatgaggtggatggagtcctccccacagtcacaccccaagcttcctcttctggtggaaataggcatcaaaccttgcttgggcgtagtcctaggagacagcaaagagaaggcctcagcaaggaatcctgctggcctgaaccctgcccatgtgtcccccaatccccaccccaggcaagagctgagggcacggacccatgagaccaaaagcacaggactggcctgtgcagcagggctgctcgggggcctcgctgctctacaggtgcaggctcctcaagctcccagcccaccccacacaccttcattctcaggaggcctggtttataggcatgggccagcccagccctgcctctcaggatgaacgtctcatccacatgcttagcactgctaccattcatcaccttgctaaccctgggtgctgtgggcactgactgaccgacataacacaccttttagagcaaaagacccctgggacacaggcgagtctagaacagaaggggagaagaggatgcccatcgcctatttcccgggatctcctgcagcatgacttttaagaaggacactgagaggcaagggagaaaacccggcttggtgttctgtttctgccactatttttctgggattgtgttgtgtgaggacaacacaatctcaaagacccactcctaatctaaaagtctgcaattctagaagccaggaagattacaattaacttttttgaaaaattaactgagctgtaatttctactctacaagcatgagcccattttaagtgtccagttgagggccttcacagatgcatccagccagttctccaccaccgcagtcaggagacctgtgtttccagcatccctacaagctcccatgggcctcttgcagttggccacaggcagccaccgactcaatatctgtcactatggactggacttttctttcctagagtagcacataaatgccactatacaatatgcagcctcgtgtctggcttctcactcagcgtgctgtctctgagtggcctgtgctgtcatgcactggtgccaccttccttttgcactgccgagtgttctcagtacacggatctggcactgtcgtatccacacacctgctgactggcatttaggctgcttccagtttgggacgattataaatgaaggtgcagaccgggcgaggtggctcacacctgtaatcccaacactttggaaggccaaggcagacggatcacttgaggtcaggagtttgagaccagactggtcaacacggcgaaaccccctctactaaaaataaaaaattagctgggtgcggtggcgggcgcctgtaatcccagctactcaagaggctgaggcaggagaattgcttgaacccgggaggcggaggttgcagtgagccaagatcgggccactgtactcctcctgcctgggcaacagagtgagactctgtctcaaaaacagacaaacaaatgaagctgctatgagtgtttgagtgcaagtcttggtgtggaatttgttttcatttgttctggaaaaattccccaggagggctgctgggtggtctaacccatcttcacactggctgtcgcgactgcattcccagcagcagcgcatgcgcattcccattgctccatgtgctcgccatttgggaccgtcagttctttcaagttttagccatcactgtgggtgtgtagggtatcgcaatgaggctttgattcacatttctttaatgactaattatacaaaacacatgaaaagattcttactggccatgtgtttctcttaagtgtccaaatcttccatccatttataaagcaggctgaggccgggcgcggtggctcatgcctgtaatcctagcactttgggaggccaaggcgggtggatcacctgaggtcaggagttcgagaccagcctgaccaacacaaagaaaccccgtctctacttaaaaaaaaaaaaaaattagccaggcatggtggtgggctcctgtaatcccagctacttgggaggctgaggcaggagagtcgtttgaacccagaaggcagaggttgtggtgagccgagatcgcaccattgaactccagcctgcgcaacaagagcgaaactccatctcaaaataataataatgaagcaggctgtttggtttctggctgagttatgagttctttatatatcctaaatatgagtcctttattaaatatacatttgtagtatttcctcccagtctgtggcttgccttttcattttctccatgatatcgttcagagttactcattttgataaagtccaactgtgatgacatatatgtgtgtttttgtccagggtccctggctcataactcccatagcccttactacagtaaacagaatctctctctctgaccttctgccgtcctttcacctgcccaaagctagactctaatctgactgtgggtcataagactcttattccagagggggtcctgcaccataccctgggataaggaatgctgtacagagaagcccgaagaacctggtcaggtcttgctaggtttagatcacaccttttttgtccaatcacatttcaacacggttgtccacatttcaatcatgcctatccaatgacatctccataaaatgcccaagaggacagggtttggggagtttctagagaactgaatgtggaggctgacaggaaggtgaacaagaatgagttccccaacccacccacagggacagaagctcctgtgctgggaatcctttcagacctcaccccacctatttatctcttcacccttaaaataccctttgttagctaggcatggtggcggaatgtctgtagtcccagctacttggaaggttgagacaagaggatcgcttgagcccagaagttggagaccagcctgggcaacacagtgagaccctgtcttaaaaaaaaaaaagtaatacactggtaaacttacgtgtttccctgagttctgtgagctgctctagcaaattaattgaacccgaggggaacgtgggaactccaatatatggctagttggtcagaaattccagaggcctggacttgcaactggtgttggaagtggggggcagtcttaaggtctcaaccctcaacctgtggggtctgactctgtccccacgtagacagtgtcgtaatggaattggagggcacccatctggtgtccactccagaactgattacttgtttgttggcggggagaaccacccctgacgtggtcactttagtcttctgtggtgatgattgttgctgatgaaaggaatgggaaaaagcactttggtttttatgtgtttcctgctcacagcaacttactctattttttcctcttttatggctagtgctttatgtaacccaagaaatctgtgcttaggtcagtaagcttttctttttttcttttttgagacggagtctcattctgtcgcccaggccagagtgcagtggcatgatctcggctcaatgcaagctccacctcccgagttcacaccattctcctgcctcagcctctccagtagctgggactacaggcacctgccaccaggcccggctaattttttgtatttttagtagagacaaggtttcaccgtgttagccaggatggtctcaatctcctgacctcgtgatccaccagcctcggcctcccaaagtgctgggattacaggcgtgagccaccgcgaccagtctaggtcactaagcttttctcttgtgttttctcatagaaacttaatagttttagccttcacatttaggtctattatctgtttcaagttgactgttgtttatggcacagaatcaggttcagttttttctccacatgactcttcaaatgttcttgcatcattttttgaaaatacaatcctttccctcttaaattaccttggcctttctgttgagtaccaggtgattatatacacatggatcaatttctggacactgtattctgttccatctgatttgttttttgttttgttttgtttttgagatggggtcttgctctgttgcccaggctggagtgcagtggtgtgatcacagctcccctgacttcccaggctaaagtgatcttcccagctcagcctcccgcgcagctgggactacaggcatgtgctacagacacccagctaattgtttcgtattttttgtagagatgagtcttgctatgctgcccaggctggtttccaactcctgggctctagcgattctcctgcctcagcctcccaaagtgctggatgactggcttgagccaccacacctggatgatttacattacttatgccaccaccacactgccttgacttctgtgcttcagagaagtcttataaccaggtagtagaagtcttctttgttcttttacaaaattattttggttattccagactctttgcattttcatataaatttcaggatcagcatgtcaatttctacacagaagcctgtgggggttttgattaggcctgtggggaatgtacaggtcagtgtggggagaatgagcatctttaccttaaggcttccatccatcaaggtggtatcttctccatttatttcacttctttattttttacactctttcatagtttccaatgtacatatcttacactattaaacatttttccatgtacagttgtttctaccatgtagaaatccaactgatttttgtatactgaccttgtatcttgtgactttgataaactcattcattaggttaagcaacttttctgttgattcctttattattttaaaagcacacaatcatgtcacctaaagaataaaggcagtgtttcttcttccttcccagtgcacctatatttcctttctttgtcttgcctcactgcaccagctaggagcttcagtacaacacagaagacatgcagtgagaacaggcgtccttgcatgttctgtacttggggtgggggtcaaaggggacattttccctgttaccactagtgataatgttggctgtgggttttcctttttttttattgagacagagttttgctcttgttgcccaggctggagtgcagtggcgtgatctcggctcactgcaacctccacctcctgggttcaagcgattctcctgcctcagtttcctgagtagctgggattacaggcatgtgccaccacccctggctaattctgtattttagtagagacggggtttctccgtgttagtcaggctggtctcgaactcccgacctcaggtgatccacctgccctggcctcccaaagtgttgggattacaggcatgagccaccgcgcctggctggctgagggtttttcatacatgcctttatctggctgaggaagatcccctctagtcctagtttgctgagatttttttttatcacattggatcttgtcaaatgctttttcctgtggtccctgagataatcatacggtttttcaccttcattctgttaatatgaagaattatatgaactgattttttcaaatataaaccagccttgcattccagggataaatgccacttgaccataatatattatccttttacatatgttagtggatttaatttttgccaatgttttgatagggattttgtgtaatgtttcttcttatggaatataaacatttaagctacaaagccgtaagtttctagatactgctttatgtatatcccacaaatactgacatgctatgttttcattataattcagtttaaaatattttctcattttctttttaatttctttgacccagggtttatttagaagtgtactgtttaatttccaaataattgagaattttctagctatcttttgttgttgatttccacttaaatttcactgagaacatatccagtattatttcaatccctttgaatttatcaagacctgtctgatgggccagcatatggtctatcttgaggaatattccatattcatttgaaaagaatgtgcaccctgcagttgctggggggtttaatgaacatgcatgaggccaggctggcagggagagttgtaaggccctatccctccttctgcgtgtgttcctcctttgttctaaccacagaagaggagtggtgagatctcccatgttttttgttttgttttgtttttgtttctgagatagagtttcactcttttttttttgagacccagagtctcgctctgtcgcccaggctggagtgcagtggcgtgatctcggctcactgcaagctccgcctcctgggttcatgccattctcctgcctcagcctcccgagttagctgggactacaggcacccaccaacaggcccagctaatttttttttttgtatttttagtagagacggggtttcaccgtgtttgccaggatggtctcgatctcctgacctcgtgatccgcccgcctcggcctcccaaagttctgggattacaggcatgggccaccgcacccggccagagtttcattcttattgtccaggctggagtgcaatggcgccatctcggctcactgcaaactctgcctcccaggttcaagcgattctcctgcctcagcctccctaagtacctgggattacaggcatgtgccaccatgcccagctaatttttgtatttttagtagagatagagtttcaccatattggttaggctggtctcaaactcctgacctcaagtgatccaaccacctcggcctcccaaagtgctgggattacaggcgtgagccactgcaaccggccgagatcaccaactttaatcgtgaatctgccattttcttctttcacttttgtcagttttaatatcatgtcttttgaagcaagacaagggtttttaatgtcctctggatgtactgatgcctttattatcacaaaatgcccttctttatctctagtaatattccttgttacgaagtgtgctttgtcgtacagtatcatttgaccatgactcaaatctgctttaaaaatccaatgtccccttcttttacctaatatcatccttgcattaccaaaccttctgcctagaagtagaaatcattgtagtataagactgaggaggtcaaaatgaactagtcccatccctgtcccaaaggaaggcagctcaccagactgtggacatttgtgttatcccccaccccaagacaactcaccaacattcattcactatggaacaacagaaaggtttgtctgaaggttaaaaatactttctatttctatgtcagtgacagtttttttttttttttttttttttttttttgagacagaatcttgttctgtcacccaggctggagtgcagtggcatgatttcagctcactgcaa

SEQ ID NO: 94652 - DNA, 29966 bp, Homo sapiens
  misc_feature (1)...(29966): n = A,T,C or G
ctcattcattcaataagtgttagaacagcttccccataactcactctaatctcttctctgcttctctcacagatctcatctgaaaaaagtttgaactctctaaatctatctcaaataaatatctttctttttattttattttatttagtttgtcactcaattagaatgtagtcttgacaaggatttcatggtttctttggtactcagtctctaatactcataacagacctgggaacttgatgaatattttcaatgtattaaattcaatattttctaaataactcttctgctttagtctatgcttaggctgagaccaattagtgaaaacaatagcaatatcttttccatatagaacaccaattatttttgtaaatcgaatgatttttttgttgtgcgtgagaataataataaacacactgtgcagagatttaattactctctttctggaaagattgtgtattatgcattgtgtcttggaacttaggcatggactcagcattcataggtcctgactgttttgaatttccttttcctgatggacctttggtttggatttattttctagtctcacgttgggtcagaaaaatcctggggagttttctgtgttctaggtcttgtggcctgagctgaccttcactgtttttattcttccttgatagcctgccttacacttggtgataatgcacatttattgacagtgaactcaaaacacatgtattctttccactaacagggtaccagataagcaaatcctatataattttgcagctggagcaagggaaaagagctgtggcaggaaggaagagaatttcttcaagaccagaatccaggtaagcaacagggtcctgtgctctaataggaggaggtgctttgtcaatgaataatatcagttgaatattaattagtggttttattaaatgagtgataatttctaaaatgtaggttaggctactggagcagaattccttagatgttattatcattttgttcatgtgtcagatgctactcttgtgtcctctttttttttcttttcttttacttttgggaaaaggataattcatgtacttggctggggttaaactttcatatgctgactctgtgaagactatccctgtgaagactatccnnnnnnnnnnnnnnnnnnnnnnnnnnnnnnnnnnnnnnnnnnnnnnnnnnnnnnnnnnnnnnnnnnnnnnnnnnnnnnnnnnnnnnnnnnnnnnnnnnnnnnnnnnnnnnnnnnnnnnnnnnnnnnnnnnnnnnnnnnnnnnnnnnnnnnnnnnnnnnnnnnnnnnnnnnnnnnnnnnnnnnnnnnnnnnnnnnnnnnnnnnnnnnnnnnnnnnnnnnnnnnnnnnnnnnnnnnnnnnnnnnnnnnnnnnnnnnnnnnnnnnnnnnnnnnnnnnnnnnnnnnnnnnnnnnnnnnnnnnnnnnnnnnnnnnnnnnnnnnnnnnnnnnnnnnnnnnnnnnnnnnnnnnnnnnnnnnnnnnnnnnnnnnnnnnnnnnnnnnnnnnnnnnnnnnnnnnnnnnnnnnnnnnnnnnnnnnnnnnnnnnnnnnnnnnnnnnnnnnnnnnnnnnnnnnnnnnnnnnnnnnnnnnnnnnnnnnnnnnnnnnnnnnnnnnnnnnnnnnnnnnnnnnnnnnnnnnnnnnnnnnnnnnnnnnnnnnnnnnnnnnnnnnnnnnnnnnnnnnnnnnnnnnnnnnnnnnnnnnnnnnnnnnnnnnnnnnnnnnnnnnnnnnnnnnnnnnnnnnnnnnnnnnnnnnnnnnnnnnnnnnnnnnnnnnnnnnnnnnnnnnnnnnnnnnnnnnnnnnnnnnnnnnnnnnnnnnnnnnnnnnnnnnnnnnnnnnnnnnnnnnnnnnnnnnnnnnnnnnnnnnnnnnnnnnnnnnnnnnnnnnnnnnnnnnnnnnnnnnnnnnnnnnnnnnnnnnnnnnnnnnnnnnnnnnnnnnnnnnnnnnnnnnnnnnnnnnnnnnnnnnnnnnnnnnnnnnnnnnnnnnnnnnnnnnnnnnnnnnnnnnnnnnnnnnnnnnnnnnnnnnnnnnnnnnnnnnnnnnnnnnnnnnnnnnnnnnnnnnnnnnnnnnnnnnnnnnnnnnnnnnnnnnnnnnnnnnnnnnnnnnnnnnnnnnnnnnnnnnnnnnnnnnnnnnnnnnnnnnnnnnnnnnnnnnnnnnnnnnnnnnnnnnnnnnnnnnnnnnnnnnnnnnnnnnnnnnnnnnnnnnnnnnnnnnnnnnnnnnnnnnnnnnnnnnnnnnnnnnnnnnnnnnnnnnnnnnnnnnnnnnnnnnnnnnnnnnnnnnnnnnnnnnnnnnnnnnnnnnnnnnnnnnnnnnnnnnnnnnnnnnnnnnnnnnnnnnnnnnnnnnnnnnnnnnnnnnnnnnnnnnnnnnnnnnnnnnnnnnnnnnnnnnnnnnnnnnnnnnnnnnnnnnnnnnnnnnnnnnnnnnnnnnnnnnnnnnnnnnnnnnnnnnnnnnnnnnnnnnnnnnnnnnnnnnnnnnnnnnnnnnnnnnnnnnnnnnnnnnnnnnnnnnnnnnnnnnnnnnnnnnnnnnnnnnnnnnnnnnnnnnnnnnnnnnnnnnnnnnnnnnnnnnnnnnnnnnnnnnnnnnnnnnnnnnnnnnnnnnnnnnnnnnnnnnnnnnnnnnnnnnnnnnnnnnnnnnnnnnnnnnnnnnnnnnnnnnnnnnnnnnnnnnnnnnnnnnnnnnnnnnnnnnnnnnnnnnnnnnnnnnnnnnnnnnnnnnnnnnnnnnnnnnnnnnnnnnnnnnnnnnnnnnnnnnnnnnnnnnnnnnnnnnnnnnnnnnnnnnnnnnnnnnnnnnnnnnnnnnnnnnnnnnnnnnnnnnnnnnnnnnnnnnnnnnnnnnnnnnnnnnnnnnnnnnnnnnnnnnnnnnnnnnnnnnnnnnnnnnnnnnnnnnnnnnnnnnnnnnnnnnnnnnnnnnnnnnnnnnnnnnnnnnnnnnnnnnnnnnnnnnnnnnnnnnnnnnnnnnnnnnnnnnnnnnnnnnnnnnnnnnnnnnnnnnnnnnnnnnnnnnnnnnnnnnnnnnnnnnnnnnnnnnnnnnnnnnnnnnnnnnnnnnnnnnnnnnnnnnnnnnnnnnnnnnnnnnnnnnnnnnnnnnnnnnnnnnnnnnnnnnnnnnnnnnnnnnnnnnnnnnnnnnnnnnnnnnnnnnnnnnnnnnnnnnnnnnnnnnnnnnnnnnnnnnnnnnnnnnnnnnnnnnnnnnnnnnnnnnnnnnnnnnnnnnnnnnnnnnnnnnnnnnnnnnnnnnnnnnnnnnnnnnnnnnnnnnnnnnnnnnnnnnnnnnnnnnnnnnnnnnnnnnnnnnnnnnnnnnnnnnnnnnnnnnnnnnnnnnnnnnnnnnnnnnnnnnnnnnnnnnnnnnnnnnnnnnnnnnnnnnnnnnnnnnnnnnnnnnnnnnnnnnnnnnnnnnnnnnnnnnnnnnnnnnnnnnnnnnnnnnnnnnnnnnnnnnnnnnnnnnnnnnnnnnnnnnnnnnnnnnnnnnnnnnnnnnnnnnnnnnnnnnnnnnnnnnnnnnnnnnnnnnnnnnnnnnnnnnnnnnnnnnnnnnnnnnnnnnnnnnnnnnnnnnnnnnnnnnnnnnnnnnnnnnnnnnnnnnnnnnnnnnnnnnnnnnnnnnnnnnnnnnnnnnnnnnnnnnnnnnnnnnnnnnnnnnnnnnnnnnnnnnnnnnnnnnnnnnnnnnnnnnnnnnnnnnnnnnnnnnnnnnnnnnnnnnnnnnnnnnnnnnnnnnnnnnnnnnnnnnnnnnnnnnnnnnnnnnnnnnnnnnnnnnnnnnnnnnnnnnnnnnnnnnnnnnnnnnnnnnnnnnnnnnnnnnnnnnnnnnnnnnnnnnnnnnnnnnnnnnnnnnnnnnnnnnnnnnnnnnnnnnnnnnnnnnnnnnnnnnnnnnnnnnnnnnnnnnnnnnnnnnnnnnnnnnnnnnnnnnnnnnnnnnnnnnnnnnnnnnnnnnnnnnnnnnnnnnnnnnnnnnnnnnnnnnnnnnnnnnnnnnnnnnnnnnnnnnnnnnnnnnnnnnnnnnnnnnnnnnnnnnnnnnnnnnnnnnnnnnnnnnnnnnnnnnnnnnnnnnnnnnnnnnnnnnnnnnnnnnnnnnnnnnnnnnnnnnnnnnnnnnnnnnnnnnnnnnnnnnnnnnnnnnnnnnnnnnnnnnnnnnnnnnnnnnnnnnnnnnnnnnnnnnnnnnnnnnnnnnnnnnnnnnnnnnnnnnnnnnnnnnnnnnnnnnnnnnnnnnnnnnnnnnnnnnnnnnnnnnnnnnnnnnnnnnnnnnnnnnnnnnnnnnnnnnnnnnnnnnnnnnnnnnnnnnnnnnnnnnnnnnnnnnnnnnnnnnnnnnnnnnnnnnnnnnnnnnnnnnnnnnnnnnnnnnnnnnnnnnnnnnnnnnnnnnnnnnnnnnnnnnnnnnnnnnnnnnnnnnnnnnnnnnnnnnnnnnnnnnnnnnnnnnnnnnnnnnnnnnnnnnnnnnnnnnnnnnnnnnnnnnnnnnnnnnnnnnnnnnnnnnnnnnnnnnnnnnnnnnnnnnnnnnnnnnnnnnnnnnnnnnnnnnnnnnnnnnnnnnnnnnnnnnnnnnnnnnnnnnnnnnnnnnnnnnnnnnnnnnnnnnnnnnnnnnnnnnnnnnnnnnnnnnnnnnnnnnnnnnnnnnnnnnnnnnnnnnnnnnnnnnnnnnnnnnnnnnnnnnnnnnnnnnnnnnnnnnnnnnnnnnnnnnnnnnnnnnnnnnnnnnnnnnnnnnnnnnnnnnnnnnnnnnnnnnnnnnnnnnnnnnnnnnnnnnnnnnnnnnnnnnnnnnnnnnnnnnnnnnnnnnnnnnnnnnnnnnnnnnnnnnnnnnnnnnnnnnnnnnnnnnnnnnnnnnnnnnnnnnnnnnnnnnnnnnnnnnnnnnnnnnnnnnnnnnnnnnnnnnnnnnnnnnnnnnnnnnnnnnnnnnnnnnnnnnnnnnnnnnnnnnnnnnnnnnnnnnnnnnnnnnnnnnnnnnnnnnnnnnnnnnnnnnnnnnnnnnnnnnnnnnnnnnnnnnnnnnnnnnnnnnnnnnnnnnnnnnnnnnnnnnnnnnnnnnnnnnnnnnnnnnnnnnnnnnnnnnnnnnnnnnnnnnnnnnnnnnnnnnnnnnnnnnnnnnnnnnnnnnnnnnnnnnnnnnnnnnnnnnnnnnnnnnnnnnnnnnnnnnnnnnnnnnnnnnnnnnnnnnnnnnnnnnnnnnnnnnnnnnnnnnnnnnnnnnnnnnnnnnnnnnnnnnnnnnnnnnnnnnnnnnnnnnnnnnnnnnnnnnnnnnnnnnnnnnnnnnnnnnnnnnnnnnnnnnnnnnnnnnnnnnnnnnnnnnnnnnnnnnnnnnnnnnnnnnnnnnnnnnnnnnnnnnnnnnnnnnnnnnnnnnnnnnnnnnnnnnnnnnnnnnnnnnnnnnnnnnnnnnnnnnnnnnnnnnnnnnnnnnnnnnnnnnnnnnnnnnnnnnnnnnnnnnnnnnnnnnnnnnnnnnnnnnnnnnnnnnnnnnnnnnnnnnnnnnnnnnnnnnnnnnnnnnnnnnnnnnnnnnnnnnnnnnnnnnnnnnnnnnnnnnnnnnnnnnnnnnnnnnnnnnnnnnnnnnnnnnnnnnnnntaatctatttaaattaaatatgtaatttacccccaaactgtagctgacattatatgtactcctgagccacattaagatgtactatttgtgctgtgaaattctatgggatttgacaaatgcatggtggcagatctccagccattattaaagcgtaacacagaatgcttctcttattcaagctcgtcttccctccacatagagggaatcaatcgacttttgtatactgatttttgtatttgcttctttatttccatcttctttaattaaagcacaagatatcgtactcaatttccatttgatcttccaaaaggaaagtactgaataatccacacctgaatttcagtgattcagactcaggtctaccgctaaggccaaacgtcctgtgctgccacctcatggccggcagagggcaatgaaacccatctttccggccatgcagggcgcatgagcagtctgcctccctcggcgggccgggtctccagggaggacctgatttttcttcacccatagtyagggaggcgcaatcgccctggctttggggctggggcctccggggaggttccggtaggggcgttggagaggccgctctttttgcaaggcccgagacggcgggccctgcgcaggccgccctattcygcgccctcagggcgtcagtatccgcctgaggccggataccccagctgggcccggatgccgtcgmtgggcccggagcatcctcggcgctgccctcccagagccccgcagaggctgaggtggcgcggggggcgggcccggctccgcgagaagcagcggcagcgagggctggaggacccgggctacggggctctggggcgtctggcctgggtgggactgagcccattcggggggactccggggttctggtgtaggtagatccggggcaggctcaggaccaagtccctctccttccaccaaggagcgcccagaggccggcgggagctccaggttcacctcctcctcctccaggtgtttacttttcctttatttctgtgaggccagaaattgtcgccatccttcacatcggtgaatcgggaccctaacactcattacctcaggtttattgttattgccattaacagtgttggtggcattatcactaagatcatcattgttgttattattgtcattyatgattattagcagrtgtgttcattttgtctyactatgcaywtwtwtwtkkgkkkgggattggttttgtatgacgttgaattgagcttctttaatcttgaccagtgtcagatttctgaagagcattccggaggacawctcctrcctttcagcgcagccacagaatttcgtgggcacaggagagcacttagaatattcccctttcattgcacagcagctttgggaaatagtggctgcctggctctgagatgaggtagaaaagactggatactggggcaagtgttagcacctccactggtgtttttatgaagctaagcgcactgtctcccamgtagacttagaataaaatctgatggctctaaagggccgtggctgcccttcctgggacttcctgggaacctttaaagcttctgtggtttctggagtaggtaggttgccaagtctgtgcctcatatggtagyaccagtctttgctgggccaacaaggacatttagaatgtttccagaagctcaggcatgctgtttctgttcctcccttctgttcaatggcaattcactgggtccctggctgacatagaacatcctgcagaaggttgggcttgggtgacttcctggtcagccttcccaggcagtcatctttgaaaaccttgaagagactcaaagaggccattcactggtatttcatgactgcaggtggggtttctggatccttgagtttacttagcatatttgaatggctctgaatggccaagaaaccytccctggtcttagaagctgccaaaagctattactgggcctctgaagagacttttaaatttttccaagtacatttgagcataggaaacttttccaggtctagttgagcyagctcaggtcgagtcctgaaaaactagtgggtattgggggatcytatcttacgaaagagcaattggtggcaaagctgtgtctccaggacagctgtgtgtgtatatgtctgtagaacatgccttttagtcatctttggtaactgaacaccatttgtgaatggataaactatattcattgctgtacaataatgaaaaatccatattaacaatggcagtaatamaaatattgatggatattaacaggaataatgatcatcatgatactagtactaatggttttaatactgataataatactaaccctatgggcttgggacatataggttttccataagtggataataggcataaatatttgtctgtgtagggttatttcaagtcccaaaaagcaaggatgaacatctagaacgagaagaaaaacaatctggaggttagtatgtgcacacctggggactcctgtgttaacttctggtgtttcagcctaagagagaatgttaatataaccctggtcctggaacaccatgctgaccaacacctaccagctttcaggagataagacagctggctgatggggcagggatccagagaaggcacgggtccacacctgcacatgttgcccagtggcagagttcatgacaagcaataagccccaggacaatgtcattcccagccacctggctgtcatctgctctttcatgacccctctctcctggtacctctaggcactggcatgtcctccagaggctgtaggagggcatgatactcagtactctcacacctgcaggaggcaagaaagatggaaacagctaaataccatggcttctggattttttttggtgggcatggcatattttgcatttgctttaataatggtggaacccagtcagtggcttgcaatacggatctagatgactctggacacctgtagagattttgacaatttccagaaggtcacaagttcttggagactttttcatgagttctttgactgaaaaggtggttcaaagagcttctatactgacttagaaaatgttgcagaggccaggtgcggtggcttatgcctgtaatcccagcactttgggaggccaaggcaggcggatcatgaggttaggagtttgagaccagtctgactaacatggtgaaaccccctctctactaaaaatacaaaaattagccgggcgtggtgacacacacctgtaatcccagctactcaggaggctgaggcaggagaatcgcttgaacctgggagtcagaggttgcagtgagccaagatcgtgacactggactccagcctgagcgacggagcgagactctatctcaaaaataaaataaaaataaaaataaaataaataaataaataaataaataaataaataaataaataaataaaaaggaagacaaaagaaagtgttgcagacactggtgaacaggtaggccctctcctgccactccaggtaaaagtttcttggccacaaacctgatttagcaatatcccttcatcttaggtgggtaacagaaagctattcatgacctatccaagcatggagagggkatttgacttagaaaactgttaggtggactagttgctgaaagaaagtgcattctagggctcacaggcctacacatagagttgctatcacataaagcatatgtacgaattctttctgagcccatgacaagatgagggtgcacttcatcagtctcctatgctggtatgaataggtacttgcctgaaaaataaaagaataattcaggaagcccattcttctacaggacaccaggcagtacagtaggagtcctggggttgctgtggtatttatgttttaaggttgtcttttaatcatcttcagcaaattcaacagtcttcaggaacataaaaaaattattcaacattgcataaaaacgaccaaaaatgtatccatgataaagaactgtaccaatataataataacattaataacaatcataatggtgatgatataaatgtcaatttaatgaagagagtaataaaaatgcagatatttaagaacatattcctgtaagcctgtgacaatgttcccatatgagccctcatgttattgattagatggagaagcttagggctacatcttgaaatatcttctgtgttggcaaagaagagtggcagtagggagaataattctgagccacatgagagcatgggcaaaagtggagatacctgtgccatgtggaaatacattacaaatggactatggcaaagggtctggccagagtcttgcctgacacacgtcgtacaaaagccttcagtagttcacctcaagaaatagsgtgtccaggctgtaaatgagaggcactgggcagacagatccacacccrcctcctgagtctcagaagtctggtgtgcatcgaacattaagcccctagcctactgagacttcacctcccagctggtcttctaccatctgattcttgagccccatcacgttagtgtcatctccatactggaattgccaacaatgtctgacggagggtattaccctgggtacttggtaccagcaatgtatgaaataccagaagggaggctccagggcttccatagaagacacattctaaagttactcaggtgatcaaatggtcatctcagagattttcagtagaactgcagcattttgtcgatacctgagtgaatgcagaaaatatccagaggcacgggcattctaggaagctccctgtgtaaatcaaatacaaggaatatctacttctgggctcaaaagctaacttagagaaaaaaaaagtgagatgctggcagaaggcaaataactccacttcagttcccaagagaaaaatggttctgtaacctctgagtttatttagaaaaattttggagcctcaggaagacccagtatatcattcctgatgtttccaggacagattggactgcttaggcctttgggaatattctaagtcctctcaggtttccatgggaggctgtaactctactcctagaacwcacaccacccccgagcaagctcattgttttctaaatattccaaggaagcccatccagggtatgcctgtattggtgagtttcactttggactggcaggagaagactgagaatgatacatcctgaattcacttggtaaaggtaagggagccaagaagtccagatctggagagcacctgcaacaccagatggcagaaggacagtaaggaggtaaagtcagctatggagttggagcttcatgtttactgcatgtaggattctgagttccaggactgatgggctggtggggatcagagacgtgtcttccttgcagggagccaggccaaaccagccatctggttgcactactgaaagcttttgtgtgcccagtggtgggcaggacacaaatcacagtcccttcacctctggctggtagttcttgatgagagaggtttgcacacaaatgttcatattagcccatggtctcctgcggcttgcttttctttcacctgctgtttttgatgtttgccatcatggaacacatttcatagagaaattctttgactctgactccaaattacacaaggaggacacaatttgtgaagttttcatatatttaggggaagctccacattaatttttgtatccttatgtttatattgtcaccagtattaaaattcatactatttaggtcattgaattcattatcatgattattaattatttttcatttatcatttctttttattgattaatttttgtggcagctgttatataacaatcactagagtttccctattcatgaaagatgtccaagttaatggagataactaggagtgttactttacaggtatgtaaatacagataatcgtggctggactgtggctatattgtctggtgtccctttgagagtgaagcctcttgtattattctaagtgacctctggagaaagcaactgtctcataattgcagggacgacttgagaaggcatcctgagcctatgcagaaatgcagaaacacttccatgatctaaacaacctatgtgaaggcctgaaagccaaagcaagatcctcttattacaaagctgtccgacaaaaagttttccaagtaacactggaggtccatcagtcactcttcctggtctggaaatgccagaaatgtcctccttggtccttctgagagtcaagatcttttcaaaatcacctcaggagccacagaaccactycatcctacctgaaattgcaggatgacttcttttgaccagaatctcaaaaatatattcgttgatagtwttgattcctgggagccgccattgcttgcaaaagatgtgccagagactagacattttctgtctcctcacttgtctggggaagactgaagttttacagaaacacagagatgggaatctgaccctctgagcagcctcaggattttctaagtcttccaagcagagtggaaatactggtgaggacccattgcaccccctgatggtctggaatcacataggatgatgctttcaaacaactgtaggtggagatacattttctgagatattccaaggaggagggacacaacyggaccagatgttagaaggacagctgagcattaagtgcctatgtagtgtttgcagcttrgtgtcccatgcagaaggggaatctgggccctggtgttagaattcagtgtaattctgggttcctgctttccttccaggaaatcccacttccaactggatgtctggatgaactactgaaagctgctgagtgtcctgcagcaggtgagctgtggccagagcccaaggatgaagggggctccctcactctgttactgtgaagaggaagcctgaggtgtagcaggcccaggccccagaagtatggaaaaaaatgaggtagggagggaggggacctcaggagaagactgaggtctacagaatcccagggtcaaggggatggtgcagtgttctggcactatccttgatgttccaagaggggtgagaatccatctcctgagtaaaaacttcacatggggtgaggaggggagaagagaacagaaaggaagcagggaagrccaagacagccaccagccttacagcaattttaaccagaaatggacacagaccctggaccccatcacaggagtgcaggcctaggactgtctccaggtgatgcatagctcccttgtcaggttagtgggttcagggattgtgacgtctgcaggggtgtggaaggctgggcaatgggagcagcttactgggctggaccagaaatactgaacttcttttccatcagtgaaatccacttctgggtcagaaaaaactgtgagttctagaggggcagggcctaggaggaggtcaggtcctgagccttcctggtttgaccccctcccaccccctgtgtttctgggtctgtcctcacttccacccagcggatcctgagtctcttcctttgagtccctgtgagtgtgttgtgtgcagtggggccgggctgcttcatccactgcacgttaaatgtttccaacactttccggccaaagcttagagttgtcagaccaccgactttgaatgttgacctggttccttgtggaacagagtaatagctattgaagtttaaagtcactttcctgcgtggatggtgaagaggcaggctgttcaggcataactgccctcaggcctggagggctgtggaggtcaccgttggcrgtgggtggatctggaacctctgtggctctagactttcaactatttcattttttcttttgtagtttttgtttgttgcttgcttttttacaatgggaactagaatgtaagatgccaaactcagcctgtggggaacatggattttcacaacagcaaccacagagcgtggtttccatttctattccctgttcatgtgggaggcagagaaggaaatcaggtgctcagttccagggacatcacaggactaggacatgtgcagtgagggtggaaggcagaggcattgctttaggagaataaaattactgcatgcacacacatatgtatgtatatggatgtatgtacacaaacatgcatatttatagattctgttctctctctctatatacaattttctttatttcacacttgatatgatttctaaatttaaatacctttgagacaaacgtgaattgtgatgggatttaaaaatgtcagtgaaaaatggaattaacaataaaaatataaatataaactttatttytcaatttaagctctactgaggtccagacactccattaagcgatgatcccagccattcattccattgctaaagaactgagggtaatgggaatttaaccgtgtcaatgcagtcttctattattaactaaagaaaaatgggtgccctttacagttattttaagattagggaaaaaatgtcagaagaaaccaaatcaggactgtaatgttgatgcctaataatttcccatgaaaactcttgcaaaattacccatgtttgatgagaggaaggaacagaagtgttgttgtggtgcagagggactctctagtgaagctttacagggcgcttttctgcaaaagtatttgctaattttctctaagaactctcctagtaagcagatgttatggtgctttgatcttacagaaagtcaaccagcaaaatgccttgagcatccccaaaacctccatggcttttgcttttgagaagtttgcttttgctttgactggaccacttctacctcttggtagccattgcttgaattgtgctttgtcttcaggatcttattgataaagccagtttcactccctgttataattcttcaaaataatgcttcaggatctgattccgcttgctcaaaatagttactaatagctctgcttttgtccactgctgatctaggcacaagggtatttgggactcatcaaatgtaaaatttctcaactttcacgttatagtcagtattgtgtaagctgaaccaattgagatgcctgtggtgttggctatagtatctcttgctaattgtcaatcctcctcaattagggcatagaaacgattttttttctcaaaaattggtatggatgtccctcctctgttgacttcatcttcaacattgtattatctcttcttagaataaggtatccatttgtaaatgactgattcttcaggttatttttcccgtacacttttcataaagaataatttatttcaccattttttgtaccccagcttcaccgtaaatttgatgtttgttcttgcttcaggtttgacagaattcatgttgctgccatagaggggctcttttcaaactgatgtcttaaatcttgttcagatatgttaaaacagggccaggcacggtggcttacgcctgtaatccctgcattttggaattttagacaaaataaagttttttaaaattttattttatttcattttaagttctgggatacatgtgcaggatgtgcaggtttgttacataggtaaatgtgtgccatggtggtttgctgtacctatcaacccatcacctaggtattcagcccacatgcattagctatttatcctgatgcactccctccccactcacccccagacaggctccagtgtgtgttgttcccctcccagtcagatggggcctgactggagctgccaaggggtggagcttctgggaaaaggatccctcctaggggggagtgtcttgagcctggggtcatgtggcagggacagagaygggtccatggcagtgtgtgctcttctctgtgaaggcaaagggcctctgagggagtattacagtcgcctcatccaccagaagcatttccagcacatccaggtctgcaccccytggctggagggccgaggactacccccgcttctaggtgagaggccagcaggaggctcagggaggaggtggggccttaagcagggggagcaggggtgggcaggatgtactttttctgaaaaggtggctctggaggccacttggggacaggacctgggctctggctcaactcccgggaggaggccacttcctggtstgccagcccctcttagccaggtggccccagaggccctttaccaatgggtttgaggaggccacgtcctttcatcctgccacgccctccattcagtcctcttccttcctgcaggagggctgggcctggggttgaggccactgttgcccaggtgtgggaggacagtggctttgggaggtacagggacgatgtgtcaaacagcatcgcctctcccagtgagatggttcttctttgtctccgtctctttccccgttgatttctccaagttgggagtcgtggcttggtcctgatgcgtctctagagccgcatcttccagcttcgagtgagcagagcacttggcggctgagggtcttttcctggcaggattctccagctaaaagacaagactgtcttttagacagtcttgctccgttgcctaggctggagtgcacgatctcagttcatgcaacctccgcctcctgggttcaagcgattctcccacctcagcctcccaagtagattacaggattatgggagcccgccacaacacctggcttatttttgtatttttagtagagacagggtttcaccatgttggccaggctggtcttgaactcctgacctcaagtgatcctctcgccttggcctccctaagtgctgggattccaggcctgacccatcatgcctggccccagctagtctttagaaatgttaagctatttggctttattttcacactgacagctggtttgtggtgggtgtgatgtggtttattattattattattattattttgagacggagtttcgctcttgtagcccaggctggagtgcaatggcgcgatcttggctcactgcatcctctgccttcccaggttcaagcgattttcctgcctcagcctcttgagtagctgggattacaggcacctgccatgacgcttcgctaattttgtatttttttttagtagagatgcggtttcaccatgttggccaggctggtcttgaactcctgacctcaggtgatccacccgccttggcctcccaaaatgctgggattacagrcaggaggtaaacctgggaggtggaggttgcagggagctgagattgtgccactgcactccagcctgggtgacagagtgagactctgtctcaaaacaaaacaaaacaaaacaaaacaaaacaaaacaaaacaacracaamaaaaaacaaattgtggttatgtagaaaatgtgtcaacttacattttcagatgtcccagccaggccgtgtggctgcgtggccagcttaagccacttgtgcttggggatgtcgggggccttatccaattttcactccccttgggggatgttgtctcactctgctgggaggatttttgttcccagggcagagaccagcgctctaacccacccctcttgcctagcagggtcggtggacctgggtgtctgtctggacacatcctccagtggcctggacctgcccatgaaggtggtggacatgttcaggagctgtttgcctgcgtgtgctgtgaacttcaagtggtaggagcagaacccgaatctttctggggatagcttcacagatccaccgctgagggggaagcagtgtagagtgagctgcccacagtgaggccctgcccctcggtcagtccagcacacactggaggccatgaggaggagccctgcggttactgtggctgggctgagactcactgaagtagtygcttccatttagagctcatgttatatttaggttggtacaaaagtaatcacggtttttgycattaaaaatgcaataacttttgcaccagcctaatgtgaaaaaagaaagcaccttaaatactagaactccactcagggcttttgctcctagagtagaattggagggaattgcctgcaggcttacatggttttctttgtttttctctcccaccatgtcctttttggccaagctcacatggtgggtttgaatcagttaaatgaatgtcatgctgtggcctcactccacccagcatagaygggtgtttggaagggtggcgttagaggagattctagaagcagtagccccagcacaagttgagcccttggcccctgctcaggagccggctcctggatgggattcaggggtgcgagcccctcgtgtgagctgagctcagggaatgtcgggatcaaatctggtgtcctagaaaagtcatcttttatgtgctgaaccagtccccagggggttgcgtttacttgttccatggccatggaattaagaaaaacatgcaaaaataattcttcagtacttgaagagcatccagcacagaaggtacaaaccttccttaaggctccctcctcaaatcggtttggccattttgatgtgcacccccaggcctttatacccttcagatgccaaatmtaagaaccagctcccagaaaccacacatcctgttccaacccccagcctggcttgagcgtgggtgggtgggagacaagctggacaccccaggggtctggtgtcttctccaggcagctctcaggctcccttggttctctctgcagcttacatgagctggtgaaacatgaagaaaatggcctggtctttgaggactcagaggaactggcagctcagctgcaggtagccatgtctgccaccacgccagggtgggcagggttctggagactggcaccgagccacaatccctgatccctgcttcccacagccagggttgtaccatggggggtctggtggaaaagctagtgagggagcagaagtcacagaggctggcctactctgctgtcccatttcagtacagtaggctcgggaaagttaggacacaaccccacctgccctctggatttatggagctgacactccacaaatgatgctggagccgggtgggccaggctgcagtttaggaagtgatcaggatcaggtaggtgcgtgggcaaagggaacttctgggaccagccttgaaagatgggtggaattctgcaaaggttacttgtttcttattgcaaaaagtaatacatcattcttgtcaacagaatgattgggaggattttcagtaaaggtccaggtcagaagtcatttagactgggttccccagtctctgtcagaaccatggtactctgttgtggtgtgagagtagccacagatcatctgtagattaaggggtgtggctttgttccaataaagctttatttacaaacacaggctgtgggctggatttggcctgcaggctgtagtttgtgatccttgattcagacagtttagcaaggctgmaaagaacacccacacccccttgttacccacagatgggtgggactgtgttggccagaggctgagaggagggtgctcacaggggaacgtacagcatgtagaggccggaaggtgctccagcgcaccaagtgtgggaaagtgggacacacggggaagtttccagaaagcatgatgtcaagttggaggcggagcgctgctgggttgtgaagggtctcaagtccaagtgagggagttagggacttgggaggggttgttkttgggtcggggacctgggttcagccaggtggtgacctgggatggggtggggacagrcaatgaagtaagctctgctctttagtattttgcagatgcttttctcaaactttcctgatcctgcaggcaagctaaaccagttctggaagaacctgcgggagtcgcagcagctctgatgggatgagagctgggtgcagactgtgctccctttggttatggacacataactcctgggccagaggctaaaaccccagggcccctgctgtccttcccgcagcttcttcttggtgtctcagggcaaaccctttcgagcagcgcctcccagtggccggaagctgaaatgaaggcagtggtgccacctggtgaatgactcgggaagctgtggttggccctgatttcttctttggagtctctgaaacgcttcctgtcttctgttcttcacgccccatgcccctgctagcgtattactgttctgtgacttccctgtgacctctgcagtactccttaccctgcatttggtctccaggtgtcacctttctgccatgttcctaacactttgattcctgtcttgaaaaaagcacctgctgcatcrtaaacccagggatgtggcagctgcagycggcttggctttktgargaaccragtgtgtccagggatgtggcagctgcagcgggcttggctttgtgaggaaacgagtgtgtccagggatgtggcagctgcagcgggcttggctttgtgaggaaacgagtgtgtccagggatgtggcagctgcagcgggcttggctttgtgaggaaccgagtgtgtccagggatgtggcagctgcagcgggcttggctttgtgaggaaacgagtgtgtccagggatgtggcagctgcagcgggcttggctttgtgaggaaccaagtgtgtccacgttgggggaatgtcatacttgatacacacgtttttatttgcacaatgaaaatgctatttttggagccagaattttcatgtctgatttatggtgattttcttaagaaccagaactgctggcagaaagggggaacccacatgcttagatagccgatgtcttattagagcgcagtttgtggttcctgatttggaatttaacattctccaaacattccagtccaatgaaagttttatccgctttcccatataaaaattcttcccacgagagtgacttaattctcacaatcccgttggagtcatgtgtgagtcctacagtgtgaggttcagctttgccatctccaagtgctctctgtagggaaacagtttctggtcatgatgagcttccgcttcccatctgatcccagtccagcctggaaacagagcacgtgtttgaggatggcggtgtttggggacaggacatgagcgtattgtgtggggctgctaggacaggcctggcggggtggggggtgtctaagtcagtatactttgttcacaggttcccaggcccacccaggtacctagaattggcctccaggatgggaccagaaatctggttttgcatagaaatggctagcagcaggcaccatgctgctgtccactctctgcctgtgtctgccccagcacttggcacagcaggacagaagcagagatctgaacccacatctacctggctgcttagtcagtccactcttcacaaagcttagaaagtggccgggcacagtggctcatgcctgtaatcccaacactttgggaggccaacgccggcggatcacttgaggtcaggtgttcgagaccagcctggccaacgtggtggaactccatctctacaaaaatacaaaaattagccaggcacgatggcgggtgcctgtaatcccagctacttgggaggctgaggcaggagaattgcttgaacccaggaggcggaggttgcagtgagccgagattgtgccactgcactccagcctgagtgacagagtgagactctatctcaaaacacacacacacacacacacacacacacacacacacacacacacacacacacagagcttagaaggggctggtgttcttataagcacagatgtctgaagagccattatccagaatgattcttttttttttttttttgagctacgatcttgttctttcacccaggctggagtgcagtggcacagtcattgctcaccacagcctcgactcctgggctctagcaatcctcccacttcctgagtagctgggatgacaggtgcatgccaccatgccagtaatttttttattttgtagagatggggtcctgaacgcatggcctcaagtgatgctcctgccttagcctcttttattattattttttagatggagttttactctgttccccagctggagtgcagtggcgcaatctcagctcactgcaacgcctcccaggttcaagtgattctcctgcctcagcctcctgagtagctgggattataggcgtgcaccaccacgcctggctaatttttgggtgtttagtagagatggggtttcaccgtgttggccaggctggtcttgaactcttgacctcaggtgatctgctcacctcagcttcccaaagcctcagcctcttacagtgttgggattacaggcatgagacactgtgacccgggatgattttcaatcacggttttttgttacgagtggaaaatgcgtatttataaaaatgaagtagtatagacatgaacatgtagcaatctctataatcctgccatccaaggatggcacctgttaacgtgtatatcaacgatgtccaatcttttggcctacatgcgccacattggaagaagaagaatcgccttgggccacacataaaatacactaatgctagcaatagctgatgagctaaaagaaaaaaatcacaaaaaaatctcatattgttttaagaaagtttacagatttgtgtagggccacaggttggacaagcctgctatatatatgttctaggttttctcctataggtatacttatgtgaaaatgattattgtgataatttttttttgagatgaagtcttgctatgttgctcaaggtggccacaaactcctgggcttaagccatcctcccacctcagcctcctgagtagttggaatataggtactcataaccacgtgtgggtgattattattagtttttaaacaaaaatggggctgggtgcagtagctcacgcccgtattcctaacactttgggatgctgaggcagcagatcacttgaggtcaggagttcaagatcagcctggccaacatggcgaaacctcaactctagaaacaatacaaaaattagccaggcgtggtagcacgcacctgtagtcccagctactcaggaggctgagatgagaggatagcttgaacctgggaggtgggaggttgcagtgggccgagatggcaccactgcactccagcctgggcaatacaaggccagactctgtctcaaaaaaaaaaaaaaggttggtggggggcttatactatgtgtgctgcttggcactgtttttttcacttaaaagatatggcaggttttttttcacgtaagtatctgaagaaagacttcctttttttttttttttttttttttttttgcttttttgcttttttgagacagggtcttgctctgttgcccacgctggagtgcagtggtgagatcagggctcactgcagcctccacctcgtgggctcaagccatcctcccacctcagcttcccaagtagctgggactacgggcgtgtgcaaccacatctggctagtttctgtaagttttgtgaagatggggtcccactatgtggcccaggttggtcttgaacacctggggtcaagtagtcctcctaccttagccacctaaagtgctgggatgacaggcctgagccccgcgcccggccagcctcctgtgtgaggttgtgcaggactctgtcgtggaacccagtatgtcttcgtgtcctggcttgtttgttggctctgtagttaacgggctgccccacgtggacaggcactggcttgtccgtgtctctgtgtgcaggcagaggctgctgcgggtacatctgtgcacatggctgccaggaggggctgtgctcagggggagctggggcaaaggctggtggcaatggggggcttgggtgtagagtggaggcacaagagccaggtggccgggcagcagtctgtgggagctcgggggttgcttgtcctctgtgtgtcctagtgtctttgtcggtgagatgggacaatgatatcacactctcacaggtgcgggggctgacaaatgtcaggtctgaggacagtggctggcccactacggggccagttccccttctctatagtcaccctgctcatcttccattgactgggtgctcaggacagtggcgtggtggatccgcctgtacagcctgtgctccagcgtcctgcaggccacagctgtgtccaaacctgaccccgactgcccctcctgccacctctattttatagatgaggaaaccgaggcccaagggcttagggaaccctgctctgaagcacacagtagggctgctgggctcaratcctccctccctgtgctgagctgccctcctcctgccacaatccccccacgacccgagcccacccttctcaccggcctctgccctagttccccgcatggtgtgggagtgtggggcatcctagcttttccccggcccccagttctttcacttccactggagtcctgtagggacagcttggggaccatgcaggcccgggtgggcgtgggggctcacatagctcggtggtgaacagctggcacatctctgggttgcagacggtaagggccatgtagaattgaggagcccgctggtgctcccggcaggcagccagcctccgcaggaccccgaccagcgacacgatggcttctgggcaatacagcacgtctacggtgaaagcttcaggttactgaaagggaccagcggacagttccakgtcatgctgacctcagcagaagggcgaggccagagaggcagcggtcatatgagactagtagatgccatttgatcatttgggccattagatggaaaggcaattacttgggtgaaaaaggagaacccttaatagagaaagctgcaaaagactgaagcaaaagaaaaaaatctccagactcactggtgttccttaaaaaacgagctctggttctcggcctatctagagggctgtgaatgacacaaagcctgaccctgcgatgaacttcgtgtttcaggtgtctgcggatttgtctgctggcttgcaggggtgggcctgtgtccctggccactgctggacctgtgattttcagggctgggacccaggaccacaggcagagctctgttcgaccagagaggagactgagcgtgctggcaggggtgaggggttttccgtggcccagccaaacaccaccttctctcaagggccctgtccttatcccagaagtggttgttttcctcctgtggtctctgaaacacacaggcatggctctgggacagagccatgtggtgacgactgtaacgggagtatgcctgtctccaacaagagggctgtggcttgaaggtcagcttaagaggcacccctgtcctttgatgtcaccctggaggcccagagtaactcttctggaagccccatcatgtccatgcccaacagcatccattgttcccttttcccagagccaagagctggttagagctgcaaggacaccgcctgcacaggatgcccggggctgggcattacctgctgcaatgacaacatctggctggatggcagagagctgacagaccgtcgcgacgtcccagtccagctgggccactgtcaccctggggctgtctaagttggcagtgatatctgcacctaatgagaggccattgagaaggacattccctcagagctgctagaggacccagctgtgacagtccctgaagatgtatgcccgggggtggcacatcttgcagatggccaggcctgtgaggccagcaccactgccaagctctaggacagtcctggtgggaggaaagggggtcatgtctgcgactgcaccagggtaagcctgcctcggtgccctgccctgtgccctgaggtcacctatcagtgaaggctgctgggttctcgatggcccattctgcaaggtagagggcggcatcccatgtgaccaggactgtgatgccgtgggagatgatggctgtgctcttggagagtgtgactgagcctcccgagggcagcaccaagagaaggcgagagagtcagtccagcgatcagaaggcaagtggcttagaagacaagcagccatccaccacatggctgaataaaccatgacaggacaaatcgccactcagcaatgagaagcagctaactgttgacatgccaacagcttgcacaggcctcaagggtgtcaygtggcatgaaagacactcatctcaggccacacaggattccattcattgaacattcctgagacaatggaattctggcgatggagcacaggtcagttgtggccaggggccgggtgtggctatgaaggggtggctgccttgtgatgattcaatatgctatgtttttcctttgtggttttctgtatctatgttttatcttattttttttgagctctgttccccaggctggagtcagtggcacaatcttggctcactgcaacctctgcctcctgggttcaagcaattctcctgcctcagctgcccaagtaggtgcgactacaggcatgtgtcaccatgtctggctaatttttctacttctttttgacagtttcactctcgttgcccaggtgggagtgcaatagcgcgatcttggctcactacaacctccacctcctgggttcaagagattctcctgcctcatcctcctgagtagctgggattacaggcgcccactaccacaccaagctaatttttgtatttttagtaaaggcagagtttcaccatgttggccaggctggtctcaaactcctgatctcaggtgatccacccgcctcagcctcccaaagtgctgggattacaggcatgagccaccacgcccggcctaatttttgtatttttagtagagacagggtttcaccatattggccaggctggtcttgaactcctgacctcggatccacccgcctcagcctcccaaagtgctgggattacaggtgtgagccaccacacccggacctgtcaactattctttgaggactgggcaccaggtccttgtgaagcaggtagagtgtgtcacctattggacaaatgcctcacaaccctataagacatgctgttgttgttgaagtgcttgatttacagacagggaaactgaggctaaagaaggttgacgaacctcatgtctaagactgcagactgggtgagtcaggatttgaacccacacccacgttttcactttgtctgtgcgggaagggtatctgggctgtgagggggaggagggtgtccttctcataccagcaaatagctccggtggccctgggtggactccttggccatcagggtctccrccagcacctcgtacagctcatccaaaggctctgtgtggacagcctcgtgctgggggcagacagagtgagagcttgtttgctttcgttctaatctgtaaaaatggccagatgattttcaccaagtttggaggggagatatgggatagaatggtgtaataccggccagctgccatataaaatattcacttcgttgggcgtggtggtgtgtgccgaatagtcccagctactctagaggctgacatgggaggactgcttgagcccaggagttcaaggacagcctgggcaagagaccttgtctctaaaaaaaaaattcacttggtagggaaacctggatgggagggccttcaaagagaggtgttgaaagtgtagggttgggtgtagtctagggcaggagacaaggattctgtgagagctgccacatgaccatgacagagaggaggaaaacaaaaggtgcttttaagtgagcccaggcagaactgtgagggcggcccatgctgcaggctgtggctgtcagcaggctgcttctccacggctggccccatcctaagattcacagggcagcagcagggtacactgggtgactgctgccctctcctggtggcacagggcagacctactggtgaccacagatgcacccttttggggaggactagggagaaagaaggtattggagaagcaggggattgtttatttgctaaaagtgtggccctttcacacagaagatctgctactgcctactgaggaatggcctctcgacatccttatgtcaaaccctgcatgttcgggcccatctttaaaatccatcctaggccaggtgtggtggctcatgcctgtaatcccagcatattgggaggccgaggcaggcggatcacctgaggtcaggagtttgagaccagcctggccaacatggtgaaactctgtctctactaaaaatacaaaaattagccaggcatggtggcatgtgcctatagtttcagcttcttaggaggctaggcacgagacttgctgggacccaggaggcagaggtttcagggagccaagactgtgccatggtaatccagcctgggcaacacagtgagactctgtctcaaaaaaataaataagtaaaaaataaaatccatcctgtatcagtcaggaaagagctcattccagcaggatcaatgcagagaattcaccagcggaagtagttccaaaggtatggcaagagctaaaccttccaacaggggcccgtggggcaacccagagatggacaagagcaggaaactccaaacccttcggcgggcaggacagagggtgtgagtgagggttccagtgctgtgggctgggccagcctggtaggaatgagaatccatatgctaggagctggggccccagagaagcagctgctgcggaaaccccaggaggcagagtgagggagagacgctggccttcccttcttcccgccctgcactgtctcccatgggtcacacgcggctgcagccagttgcctggggaggcccctgccatactggggtttgcaaagcaggcccagggcctgggaaggatgaggtctgcagcacgcaggtggctatgctgtcctgctactgggcggacactgcccataactgacctttttgatgagttctgagagaaagcaccgggcatacttgactgacggcgggtgcttcacacacacaggatgcttcacagtctactgcaagggacagaacattggttgctcgagagcccgtcttaagtcgcctatgagcctcaagccaacatggcagagggcaaactccaggctaccggatccctcagcaaagatgcagatggacacagcgttctggccccatgcatctgaagtttgtcttaagctataagccgtttcctaaaaatgcttccactgcagtggcacaggctatggcagcatttctaatgcccattctgagcaggaacacagggcaggtgggcccaaaccacctccctcccaggggagccagtgtgaaccagcgtttgcagtaaagacagtcgccaactgtctggctctatggaagaggagggaaggcccactcggcaactgctctctttcagcgtgtgtccctggggacaggatggaggggaggggacgctcagggtgacactccagctaaagccaagagaagtcaagtgcaggacgagcaagttccaggcagtggcaacagctggtgcaagctctgaggtggccacagcctggcacttggaaaggagggcagagggactagtgcagcaggacaggggatggtaggaaaacaggagcctggagggagagggaggagacagtctgcagtgcctgctggctgggagggatgcagattctgcccaagggcagcaaagtaccccacgcaatacacaggctcttcaggctggtgctggtttttcattttttctgacacagagtctcgctctgttgcccaggctggagtgcagtggcccaatcttggctcaccgcagcctctgcctcctgggttcaagcgattctcctgcctcagcctcccgagtagctgggactataggcgtgcaccaccacgcccagctaatttttgtttttttagtagagatgtgtttttgccatgttggccaggcccgtcttgaactcctgaccttaggtgatctgtccacctcagcttcccaaagtcctgggattacagatgtgagccagtgcacccagccttgtgctgggttttaaagcagctattcctacatttcatgcttcaccacctacgagagtgatgctcagggtgaaactcagagcagggtgcaagacaacttcaggtatctccatgctcgaagccctgacctactgtattgccccaaaagtcttccctgctgtggctgcatcttttccacatggataatcttggttcacctctagcacaggaattcttcactggggctcctaggatgggctgggtgggtgggggtggacaatgtctgcctccagagtttgtatggaaaatgtattcttctggtgcacttctttctgggagggagtctattgctttgtcttttcagaagggctcatggctcttcgaaggtgaagacccaggatgcagggtgatctgcacttggccctcaaggccaaggtcaggctgtggctgggccgggtggtgatcctgcctctcacctacatgcagatgctcttgagtccaaaccccaccctgggcaaagtaagggcccatttaggtctagaagagacaggagtgggcaggacaggcctcacgaatgcaaaaaagaaagtctctgagcatctaccaaatgttagaagctgttttgcacctgtcatctctgtttttgctgtggggggtttaaaaaactttccctagattcccccctctcatgcagaattttgtatattctgatatctttgtctaagtcttagatagaaaatgaaagagctggagctgttggaggtgccgacacccacctgcagtgctgactcaatggttttgttccttgaacaggggtgtttttaaagggtacaag

SEQ ID NO: 94653 - DNA, 27276 bp, Homo sapiens
accttgtctctactaaaaatacagaaattggccatgcatggtggcagacgcctgtaatcccagctactcaggaggctgaggcaggagaatcgcttgagcccaggaggcagagactgcagtgagccaagatgacaccactgcactccagccagggcaacagagtgacagtccatgtcaaataataataatcataataataatccagggcacatactgattagatgccatctcttgaaacattctgtttctattgttcctggcaaaggctcttgcagtcagcagaccagtgcaagacaagctgcaacctgactacacctgcaggcttgcccatttaggtgcaggtgtaatagtttaacttttcatcctccacggtgcgtccatatgaacgaaaattagatggtgacctttcaacaaccacaccctatcttcgaggccaccacgcccggctgatttttgtatttttagtagagacggtgtttcaccatgttggccaggctggtcttgaactcctgacctcaggtgacttccaccccctccggcccccccaaaatgctgggatgacaggcgtctttttctacttccctttctgggacgccttctcccaccaggaaggcccacggggaccagagaccatcaatctctggcctctgcacaccatccccgccagtgcgcagccattctgttcaacttagatatctccgagaatgggcagctcagtcccaaccacgggaccccagagatatcagaacacgggtccatccccaggcctcccgcctaagccgccagacttttcttaaccgtgccttgtatatcgctcgtccccgggaactataaacactcacttcccgacgaggacctgagcacgtaccactggcggggtcattgcccattatctcacctgatcccaggcccagggccgagagtttcccagggcaaggctgtgagcacgccacgggcaagcctgggcccagccacggtgcccgtgcgccaccccaaaccggtgcccccgccgccccagactcactctttaaaattctttgcaaattgccctcgaagtccagggcccactggttgagtgcgcaggtggccacggtcaccttccggcccatcctggccgcagtcgcttgggcaggaggccagcgggggacagcaagaccagggtcccagcgaggtaggcggctgggacgccggaccttccgggttgcccggccccgccccctccccgcccatccgttgaggctccggccaaggaggactgcggcgtcaggccctgcctacggatcgccccgccccgtctgaggagctcacgaccgcgcctgcgcagcgaggttgcctcagcgttcacggcaccgcgaagggccccgcccccgccccggctccacccacgtcccaggccccggcccctccccggcccttgcgggcaaacccgttcgggtgcacaggtgcagggggctcaccgcccagctgcagcacccctctattttatcccacaccgccaccccacatccagcttagccatgttttattttaatacggcatgaaacgttccaaatacaccaaaagtggagagtacggtaggagcgctccatcgtgcccgcgggacagcagacgatagcaatcgattctccgtgctgggaatcccgccaccctgggcggatggcgctgaattcttgggaaccctctcctgcccctttcactcctgtaccacgtgtgtaagtagctcaggtagcgcactgtttgccttttctgaaactacaggaactgcacttgaatgtgcttctgcaacttgattttttcccctgtaatatgagatacgttcttttaattatttttctgcagtttggtattccatagtggcagtaaagcaggtttattcaatagcggatgggcattgacgttattagcagcgttttgccaacagacgcacgcacacaggcactgctgcaatttcctttccggcaaggtttccttcgtggcctcgttccgccagttcctgcagcagctttgcagagtagtagggttcgtgctgtttgactttactaaatattgccaagtctcttctccagggcgcttgcaccgattcactaccagcggtttctcactttttattttttcacatttcctctttagtccacccacggtagaatccatttttcccccatataaataactgcctcatcatcgttgcttgaagaggccatccttccttctgtcattcatgttagtttaaaaacacacaattcacaaatttggaaaaagagaaggctttatttcttgtaaacggtcgtagcctgcaaggtggcggccatctgtctgaggctgggaatctgtctccagccaaggccagagacaggcacgtccaaggaggaggggttggggcaggagcgctatgctgaagggattggctaaacatacatattcaacaggtaacaggaggagctatgaatattcatgaaggtggtcctgacacatgccctcttattgagcaaagcatgtaatatatgacccatgttcactttggggtggagacttaacatttacacatcttacaattagggcctttatggcaaaacgtcttttcaggacacaaaggcatgcaggtgcatcatctctctctattaacgggtcagctggtcggcatggtcagctggtcggtggtctcttattaggagaaagtcactgaaatcagtctcttgtccaatcacagctgctatggctggtgaaacagagtcagttagttggcacctagtggagctgcaattgttttaatattccctatcccaaggctagtgtgtgtttggctaatagagaaacagaaagccttgtggctcttagaatatagtttattctctaagtgtgggttgcctgacttaccctcgcctagcatggctttgggtcctgtttataatttggtatcttattgccacagagtccgttctgtcagtcttacgatctctgttttaacatgaatgccggccagttgtggtgtccaaactctgaaacagggggctattaccaggcgcatctgacctcccatcccatcatgtctgggaattcagtgttgaggtttttctggtgtccccttggtcaggagaaggtccctttggtcaatggggggcttaggattttatttttaccttatgtacatatacccgttttcacattttgaatcactttttttcctgtctataaagtagtgcttgttcatgacaatttggaaactccacaaaagcaccagaatgttatacatgctaacttatttaatcctcacagtagttttcatgcttctgaaatccacacgatctgctcaaattatctcctgccaacaatggctgatgccaggcctgggcagagaaggggaggatccttgaacatctggttgtcccagaaaataagtaagtactcaaaggatggtagatacatgtcatatgaaaaaagaagccaatttgaaggggctcccgttagctaaatacaggacaatacagtaaggatcataactcggtcagctaaatccattagggcatactgataaaaaataaatcaaagaggaaatccctacagaagaatgcttgctaataaataatttattaataaatgttgagggaatgataaaattagaaaattaacactttgtcccaagaaataagggattcaggcaagattcctcattaaatgctagttcactgggtgaaaggtcatttgggaacagcatatttacagtctcaaagtatcactgcaccaattactcattaataacaaaaggaaaaatggagacttctggcagaaaccacggagccccactatcaatcatggagcacagtgatatgttgtcttaaaaaagaaaattttaggactcttgaaatttattaggtcaacttgggcaacagagcaagatcctgtctttaaataaataaataaaaataaataaatttattatgtcaagagggaagttaagtcctagaaactgggtcacatagcatgtttgtaattttgtcttttagattataggctgtttttctttatcattcatgttttataaatgactaggagagaccacagaccaggcctgctccccttttaattactgatctttattatagattgtctcttattatcccgtacttagaccagactcctacatcttcagtgtaaaatgttaaatataccttccacctaaaaaagaccacctcagctggtcagattataactttatgcataaaaagatgttaaaattctgttaaacttccctaaaatttgtctacataaatgatcccaaacatctacagttcaaaatactgatttccattctttaaaatctgtgcttcccaggcagcctgtcctcaaactttatacacttaaataaactctctttaagctaaattctgacccgtttggttatttcaggttgacagccttctaacaagataaaacatgctctatgtagtatattatcctgccaaaaaaagtgcatagcctgaatgcacagtgtggctccctgattagatcctggggtttaaaaaagggctgtagggcagagcttcacacctgtagtcccagcactgtaggaggccacagtgggtggatcgcttgagcccaggagttcgagaccagcttggggaacatagtgagaccccccccccacccatctctaccaaaaaaaaaatagcgtgtggtggtgtgctcttgtagtcccagctactcaggagggtgagggaagagaatcgcttgagcccagcagttcaaggctgcagtgagctgtgatcgtgccactacactccagcctgtgtgacagagacccccgtcttaacaaagcaaaacaaaacaacaataacaaaagggctgtaaagggcattattgggacaaccgcgggaaactggagatggaaaatagataacagcattgaactgatgtggtcattgtattttggtaatataggaggttcttgttcttaaggagttggataccgaagtatttgggaggggggtatcacggtatctgcagctaatggtgggggctgagtggggaggaaaaaagaaaaatacacatatataaacasagagggagagaaatgaaacgtggccagctgctcacccctgctgaacctaggaatctgcgtgctcactttacgttcaacttgtttgtatgctgaacatttttcaaaacaaaaaggtgcagggaaaaaagaaaacatgatgtctctctgagggccacagagacgtggcaaccagatcgctctgacagtaaggcctgttacccgagctgttgggtgtggggtcagcagacaccttcagctgccccctcctccagggctgcctcgccccaggtcatgccctcgcaacgtggcccgtgcgtccggctcgcactgtggctcagcttctccctttgcccagtcctgctgctccctcccctcccgtcctcgcacaggtgtgcccccctaataagcaggccacccagactccatctcgggtcactttggcggtctcccagcggcgagccttccctgacacccatgtgtttacctgatcgtttatggaggatcctcttcgccccgggacgtgagccctaggaccaagaactgtgtctgttttgctccttgcggtgcaccggcgcctggacatacgctccatcaatgtgcgtcgcgagccgctgaagccccatttgccgagggggaaactgaggcacgatgctccaggtgatgagcctggcgcgttctccgcgcggcccacgtggccactccgccacgccccacccccagctggtcagctgggatcccgaagaagcgccagaggctgcgcccacccactagggcccgggcgggccggtggggcggcagggcggggcctgggccgtcaatctcgagtccggccgctgccgaatggcgggcgcggtgggcccggagtcagctcaggctcctcgaccaatcacggggcgcggagccgccgggcgtgcagggtccgcctccgattggcaggcaatcgctgacatcatccgggggcgggcgcccctgccctgcgggtgactycgacccctggctagagggtaggcggcgtggagcagcgcgcgcaagcgaggccaggggaaggtgggcgcaggtgaggggccgaggtgtgcgcaggtgagtggccaaggtgtgcgcaggtgaggccaggggaaggtgtgcgcagtggggggcgcttgcccaggtgagcaggtgcccactcacagggcgagggtggggtcaggggtagggggcgtgcgcgcaggtggggagagggtccagctcacaggcgaggggccgctggggctccggggaggcggggcggaggcgtggatagtccccctcccccacgagccggcgtctgagggatgctctgtccccgcgctgtctggagcttccccgggcgaaggctgcctggctccggggtcggctcctggccccatgccgcgctccgcggcggctctttctcctgccccacctgttgttcgcctccctctttgtcagtgctgagccaggcacagcagctttgcgatgggactggcttgtccgccgtcctccctgacatgcggctgttgaagccctgagcactggaccttctgcctcttgcttgactcctactgtgggccttgagcktctgccctctcctgaaatgtcagctgcctgcggtcttattcatttttgtgttccttgcaggactttagccggttgagaaggatcaagcaggcatttggagcacaggtgtctagaaacttttaaggggccggttcaagaaggaaaagttcccttctgctgtgaaactatttggcaagaggctggaggtaagtgtatctcagtgccctggatcgtgggcgcaggctatggcttcacagcgttgaaagtacagacagactggtccaccagctctcgagtgccaacgactgtctgtgcctcttatgagtaaaatacaacataccagggcacctcccctttgtctgttcccagccgtctattgggaaggatgttacttagatgtttattgcacaactcaatgcttgtggctaaagagctgactcctgggtgaatgaactctgtaataagctaaaagtacttctttggtcttgttttaatcccttttgacaacattctcccagtggctttttcacactttagttctgaggttacacatcccctgacccttttgcaatttcccagtgttttacataattgataatgttggtaccaggcattgtccccttgtagcttatccatggcttggggcaagacgaatgccaccccattctacttagccttcctgtaaggcaagtgtgcatgtgggtggtctggattaacaccagtcagtgtgggaactagggatcggagggagtgggggcactgagctggtaagttttggctgggaagaaactaagcttgtatcttaccttgatgagagcctgggggagaggaactgtctaaagcaagccagcttgtccaggtggctgtgatcttgagatcagactcactagcgtgtcagcttttctcagaagtagttttctttcatccactttgattttacagatataaggagagtgactggcactcgccaggctctgtattcagtatttggggccggagagagacacggtctcttcctatcaagaactcttcgtcttgttttgtgcatcataggaactgcataaactaacttgtgtaaattgaatgaagtgcgggtactgaagttctcacactgcataaggaaaatgtctttcatcgttgaaattttttaaatgtgtgtgaatttttattaaagtaattcatgcacacatttttttaaaaatcagtgttaaaaggcttcagaagaaatactctctaccacatcccacatccgacagtcttgcttgccagcagcaaacacttttcattctttcagctacttttgtgttgttgtttgtacctacttgtttctaagtaatttccttttagtacccctaactttgcaaattcccttctgtgcatacaatagtcaataaatagtcagagtatacattgttatgacaaaattaccattattcactgttgagccaagtaaggtcctataataatggcttggtttctttttttccttccttatatgactttttatttttcctggagttaacagttgccttccttttttttttttttttttttttcatttggtaaggtttctatgcatctctcattcatttttttctggatgctctaaccgagctgtcacatatatcaataattttcctacacattcagatgcaacaaaattcatcattttcatttcctctctttcctagccattcatcttgtaccaatgtggactggtttctggttagtcctgctgcatagctgtcctcttgggacttgcccctgcccttttgtggacatggcttcagcagctctcttgggtctccagtttcctggatcctatgttgttgtccttgagtaatagttcacataggagtagaattctaggttgcaaaaagttttcctcaaaattttgaagtttttcatcattgtcttctagaatccagcttgctgttgagaaatctaagcctactgtgatttttactcctgttttttctctaaaagctttcaagagcatcttttaaaaaatctcagatattttaaagcttcacagttatgaacttgttctggaagtggggatgtcactgcttcccccaaattataaccatgtagagcagctgtgggtacctagagacattctgtgttctcttccccttttttttgaagggtgattattgatggtcctacatgggccactgttctaggccctggtagtagaacaatgaagaggacacacaattcctgcccttgggaagcttacattctagtgaggggagacagacaatacacacacacaaatgaatacttctaggcratggggagagttactaagaaaataaagtacccagtggagggccttggcagggaagctggggagcagctgcttcagattggctgagagggaagatctccccaggaggggacattttacatgagccctgaacaaggacacctgcaaacgtgctctaagcagaggaagtcagtgccacagacaatttaaactgtgttcaaggatgagtgaagacccctgtgttcctggagccaaaggagaataggggagagtggtgtgtaggagggaggcaggagccagcttgtgctgtaagagkgggggcattctgccatgtttggagaatgaactgagactagcaagagcagccatagcaaggtcacgtgggaggtgattgcagggtccaaggaagagagtctaagacaagatgatctcttccctgcctggaatctgctgtcaggaacaaggtaccgggaagatgtgcacaggaggccagccctgccaggcccaggagcagtggtggatgcaacagggaaaggtggtgtctgttatttgagggataatgtaagcaaggttctctttcttgcagggcccaatrgctgcaaaatcgcaacccaacattcccaaagccaagagtctagatggcgtcaccaatgacagaaccgcatctcaagggcagtggggccgtgcctggtaaggatcttgcctgttctcccagctagaaagtaaagtgtggtctcagagctttccagcctttggaattgtatggacccaaaggaatgaaggacctttttaaaaaagatttttttttttttgtcaagactaatgaaaggtaaacagttttccactttataaagtaaggaattataaaaagaaactagaaatcatggtcagtcaacaacttagaaaaaaagataaaggcttaaagggcagctggggccttcccaccatcygggggtatgacctattgtcacagctcccatttcgccatagaaccatggggacttcgtgcagggtgagtatcctctccgacctggaactggggaaaccactggccttggtggttgtgaaagacctacctccgctcatattctgagctctgggccttccatgggggccacagatagtgccaccagttaatcaactacagtagagcaggcatgttragtggcttccctggccgcaaggagggcccgtgctaggagctaatgccttctgtcatggggtactggtgggtttgagcaacagttctcccacacagagcctcttagggtcctggtggggcccagggcagatgggccccagtgtgactgcctgcatccgtcctcrcagggaggtggactgrttttcactggcgagcgtcatcttcctactgctgttcgccyccttcatcgtctactacttcatcakggcttgtgwccartacagctgcgccctgacyggccctgtggtggacatcgtcacyggacatgctcggctctcggacatctgggccaagactccacctataaygaggaaagccgcccagctctataccttgtgggtcaccttccasgtcagcagcycctgccctgggrttgggacacagmaggtggggagcgtgccctcctgctggggtagtccttccatttgtctgggacatggatcctggctcaggttgacatctgggytcccgggacccagcagggcattccctggactctgacatgttcagattcatcctcagctgtaaggcaggaggcacctgtcacatcagcgtttgatacaccttcayggcatgcctgcatgcagttgctgggcacgcccagctctgcagggacaagctgaggataggagcaaaaccccgtgggagggcagtgctgtcctgaggaagccccattgtcagcaggagtcacgccttgcaccaggtctggaaaggagcatctcagtccccaaagggactctctcagtcatgagatgccactcagagaagcgagggccatgtttccccacaggcagtcgaggcaggtccaggacgtcctcagctccatggtgtccccactggcctcccagtccagagggagttccaggaaggggttgttgtaaacctggtgcacacatgggtggtgctgattgcctgaacccaggaaaaggtttccagggaaacggtgctagaaagagacaggcctgggttttccttcctgggcgggaggaaggctcagatcatgattagctgtttctccccagggtccaagcttctgggctccagaatacttctcagttcagatctcttggtccctttgagtgaaaaatgacaggggcagtgtgaatcacaaatagccacaaagcaggaacccccacctgtccatcartagatgaatggacccacagaacagaacactgtgcccacygtgggacactatttggcagcggaagggaatgaagctctgatgccagtaggcggatgacccttgaagacactgctgagcgagagaagccagtcacagaggctgcatactgtgtggttccctttatatgcaatacccagtacaggcaaatccacagaggcagaaagctcagtggcagccaggggcggcagggacagggaattcagagtgaccggagattggaacaacattttcttctgtggtgatgaaaagttctggaattagcagtgataggtgtacaaccaaccatgtaaatgcgctaaatgccgctgaattgtgcactttaaaagggtgaattttagccgggtgtggtggtgcacacctgtaatcccagctacttgggaggctgaggtggaaggatcacttgagctcaggaggacaacgctgcggtgagctatgattgcaccactrcactccagcctgggtggtagaacaagacctcatctcaaagatagatttatatatatatataaaaagttgaattttatgggattctccattttaaaaaggtgactgggagggacctgtgcgctctcctgaggggcgaatggagccctgggggagaacgccttggcaccttccctggttgatgagtttattgtctcagaacccccttcaaaacccacagcccagcagtttgagcttccaggagccataagtgcttcaggaagaaaaagactatgattgtgattctcatgttcctgctatkcgtccccctttgcaggtgccctccaggcggggggtgatcaggctgcttgtgtgtttcaggtgcytctgtacacgtctctccctgacttctgccataagtttctacccggctacgtaggaggcatccaggagggggccgtgactcctgcaggtagcctcctcccttccaccctccccaggctcccgttctcatccctttctctcaggggccagtcctccccagcgctgctttgtccctaagacttgtcacaggatagaaatccattttgcttggatttttcacagcaccaggcctcaaaaccattgagggcagctggggccatcccacacccaggttagaaatcactttcctgggtaaggagggaatggatggcccagctccttcccagccccatagcaggggatgcactcggcccatgaagcttcctgcagagaccaccatgcagagaccaccattcctcggggctgtccgtgggagaccttgtctgttcattccttgccatcattgagaacccacgaggagcctggctttgtgcctctcacgtgggtgcagactggaaccgcatcccaactctgcccccagaagctccctgttttgaggggtggatgggctgaggtgctccccaacaattacagagggggccaggcataccacaggggcatcctcacttgcttctgcccctcagccctgacctccctatcagactgcacacctgtcactcagcctatggccagttaacgagatgcagaaccaaaggatggactcagcctcccctccctcttcctaggagcaggtagttccttggccaagggtataggggcctcagagatggttcctggggccccagatgagggtccgcagcagcagaggcccagaaagtgaccagggcccccgccaggcatgcttcagcccagccaagctcctcactgcgggttgggaaagcgccttcatttctgaatccttcatctgcaggggttgtgaacaagtatcagatcaayggcctgcaagcctrrctcctcabgcacctgcyctggtttgcaaacgctcatctcctgtcctggwtctygcccaccatcatcttcsacaacyggawccyactgctgtkstrcgccaacatccttggctatgccgtctccaccttcgccatggtcaagggctacttcttccccaccagcgccagagactggtatgttcttagcarcgggtccagcctgatgtagaaagtgcaaacttcacccctggcctttcttgctgcctggggcaggtggttgtaaagccctgagcactgagaatccgtggaagaggaggagggggatggaacttgcttcaccctggggaacatcctyyctgaatgttyggtggcttctccagccttggcaagaatgcagctgaagatggccaggtcagctgtggtggccaagtcattgcctttagggctggcgtgggggtaaggaagccaggaaaaacttctggcttggggcacaggcagcccrttgcctctttctttggataagctggtgaggcccaaaacaaccttagtgaagagtcttattgtccctgtggctttaattaacagcttcccaggagagccctgctggcttgtacccattcccatggctggacagtggtgagccactcatctctgyccactcatccattcacctgcccatctccccacccacccatccacccccctacccattcatctacctactcacccatcatccacctacccattgccccatcccattcacccacccaccaatgcatcatccatccacctatccatcacccacatccacccacccatcatccatccatctaccctcccatacccattcatccatctgcccatccacctacccacccacctacacatctagccacacacccatccacctgcccatctccccatccatccacctacccacccacccatccatcatccatctcatccacctgcccatccaccctccaccccgtctgtctacccacccgtcatctatttgtccatccacctatccacctacccacccacctacacatctagccacccacccatccacctgcccgtcatccatccatttacccatccatccactctatcagggcctgtaatggcatgtgccgaggggaaggaatgcatcatctcatccaggtcaacctcctgcctgagcaatgtccgcagctcctgaccggcctcccttaccctctcaggccctcctagcctgctccctctggcttcctgggtgacacttctgaacacacctgatccctgccaccctgcaccccagctcaaccctgcctatcatatatccatccacctgctcctctccccatcccattcatccatccttccacccactcaccctgttatctatccatccatccatcataaaccaatgtttggggggttctcttgtggacagttgtaggcagtgggacttacagttcagtttgggggatccaaaaaaccccagtgtggtttacacctaggctcttgggaaatgtttctggaggatgacactttgtagcttgtgtgttatcagataacgaggctggccttcaatggctcctggaaatcatcctcgctaccttataatcatgtagactttgtgtgttttgcttctttctacttaccctacctgagggaactggacatgaaaataggaktttctagttaacacagaaattgttgtgtgtcctcagccagctagacctagtcagggtctccacaggggttatctcggctgatgctctggccctccggggattgggggattcaggtaactggtcaaagaacttgtcctgcacatgctggaagccgggcccagggtgcgtttgtcattctctacgttggcgtratttataatgtcactcacccatgagggcccacgtgccctgcgtcggcttcaaaccgtgtgcttgggccccagamcgtaatctcagtgcaatcaagccagttcttcagctcacctgtgccatgcgtcaagggcatctggagaagggtagagagaaacccaggtaccagcccagggccggtctcccacccttcccgggtgcagagcaggtgcccctgggcttctgcctaaggaagtctctgctgagcagcagctgaatgcaaagcaaagtgaatgagggcgccaggaaccagccgacaarcattccagccgtgggggtcccagcggctcatggccagcttctgcctgcrccgtctcacgttaccctttaggaccctggrccagtgctgggctctcgctaagtaaggtggcttcatcttgtgagatatgctcatccactaaatgtatcttttatttatatttttaagcaaattcacaggcaatttcttttacaactacatgatgggcatcgagtttaaccctcggatcgggaagtggtttgacttcaagctgttcttcaatgggyrccscrggatygtcgycygkaccctcatsarcctgtccttmgcagcgaagcagcgggagctccacagccatgtgaccaatgccrtggtcctggtcaacgtcctgcaggtgcctgtyatggctggagagggtgaaacgccgatgccggcaggctctgggggaacccgcaagccagarcgtattcccatgaccttaatctactgcttgtaaaagaragtcagctgccctccccaggtgtcaccaggaagcagccggcgagcacttggtgaaggaagccatccttgggtgcctgtctctgccagccctgggaggggaggaggcaggttctacgcagccaggcgtggtccaggaaggtctcccttggggattacacctgggtagaatctgggggtgtgtgggagttaacctggtagagtggaggcaagagtgcatgctccaggaaccccctgtagggagagagggtggcaagtctgggacactcagaaacatcccgcatcctgaccagagagcgttcaggagctcagagccaggtgaggctggaggcctcatggaagtcttcctctttatcttaaaagcagcaagacccagaaagtgtgtgctgagctggggtgcagggtggcagygatcaggtgcattcggaagcgtcacccagggagccagcgggagctggctaggagaacccgagagggtgagggaggcctgtcaggagctgtggacgttgctcgggcaggaggttgacctggatgggatgaatgtatcccttccccttggcacgcgccattgcaagccctgagaacctgggctgggagagatgccagggccatgggctcggggtggttctgaggacaaggaagcccttagccctgcccatgacccaggcaggaacagccccagcygcagggaaggaacagccccagcattgaggaagttgctgagcagctcccgagcaccccctgctgcatcygcgtggagtgtgatttccccgaggtccatgggggccccaggagggccgggggtggtcagcggctgcttctgtcttgcaggccatctrcrtgattgacttmttctggaacgaaacctggtacctgaagaccattgacatctgccatgaccacttsgggtggtacctggrctggggcgactgtgtctggctgccttatcttwacaygctgcaggtgaggaggtgggcagagctggcccagcggggcatttggcagacacatgctaagctttctccttgcagaagcgtctgtccttgggggcaccaaagctgccccctgtttctaggaagaagggaaggcctcgtgtattagccagctcagccagcttgggccagcagccagggaggtggccttgagtatgtycctaacatctgcaaagtagggcagatgccggctcagggctggatggggcagtggaggtggaggtgggtcagtgcgggcactggcaggaggggtcctcttcattcctgcctcctaggatgtgctgggcactggggcagggctgccctgggagttccaggacagtaggggatagcaagtggccttgtcattggcatcaagccccccactcccctcccagctcaacgagagcagccctgctctgatttggggagagtgctgggctcccaggtaaggtggctgcttgaccagatgccacctgcccatttcaagagcaacgagccccctggggacagaaataactcaccccagggcacttgcttagcagmacggtggggtggcctgccccaagaggctgtgcccaagtggagagaaccaacgtggagaggctgtcacctattcaggatgtgacaggcccggcatcacctgtgacagccagtcctgtgggatggaggtgcggrtgtcctggaaaaccaggattcccacagcagagggggccagtaccaggtggagggtgcagagccccagctggccccatgctcacaccaggtccttggagccccccgcatggcccacccggccccatttctccacytggctggctgcaggtctgctggttccctggttttataaactccattttccaaggatgtgaaaacgtagcaataggtcccactatataatagctcttacttgctttagcctctgtgtgtgtctcgagatgtacattttttatactatatattaggyttctcccaagaagcagaatcaatagaggggtggagggtatacgtgtaagaaagagatrtatttttcaactcatgtgattgaagagtgacaagtccaagatcttcagggcagcctggagccccagggaagagttgatgctgtgcttaaatagaaggtcacttttttttttttttgagacrsagtctcgctctgtcacacaggctagagtgcagtggtgtgatcttggctcactgcaacctccacctcctgggttcaagtgattctcctgcctcagcctcccgagtagctgggattacaggtgcatgccaccacgcccagctaatttttgtacttttagtagagatggggtttcaccatgttagtcaggctggtctcaaactcctgatctcgtgatccgcccgccttggcctcccaaagtgctgggattacaggtgtgagccactgtgcatggccagaaggccactttttagcagattccctcttctttggggaaggtgggtcttctgtctcttaaagctgtcaactgattggatgaggcccacccccattgtgaagggtcatccactctgcctggttgactgattaacatatgaacctcatctgaaaaatgcctttacaactagtgtttgaccaaatatctgggaacaatggcctggccaagtggacacgttaaattgaccatcacaatattaaattcagattatatttttaatactgttacatatttgatgtttatgctatatgtcatatatatagggggtatatatacacacacacatacacacacagacaggtagaaggcaggtagagttactcatttaatgaccacaacagccctcaaggttggtgcttttattcacagaagagaacacggaggcaaggcgtgtgtcagaggcagagctggggtttgaccccaggccgctgggcccycgagcccacactcctgtcctctccctgggcaaagcaccgcttgaccccttccccctcgccccccagggtctgyacttgktgtaccaccccgtgcagctgtccaccccgcacgccgtgggcgtccygctgctgggcctggtgggctactacatcttcyrggyggccraccaccagaaggacctgttcygccgcacrgatgggcgctgcctcatctggggcaggaagcccaaggtcatcgaghvctcctacacatccgccgaygggcagaggcaccacagcaagctgctggtgtygggcttctggggcgtggcchgccacttcwacyacgtcvgcgacctgatgggcagcctggcctactgcctggcctgtggcggyrgccacctgctgccctacttctacatcatctacatggccatcctgctgacccacyrctrcctccrggacvagcacckctgcgccagcaagtacggccgggactgggagcgcyacaccgccgcagtgcyttaccscctgctgcctggaatcttctaagggcacgccctagggagaagccctgtggggctgtcaagagcgtgttctgccaggtccatgggggctggcatcccagctccaactcgaggagcctcagtttcctcatytgtaaactggagagagcccagcacttggcaggtgtccagtacctaatcacgctctgttccttgcttttgccttcaagggaattccgagtgtccagcactgccgtattgccagcacagacggattttctctaatcagtgtccctggggcaggaggatgacccagtcacctttactagtcctttggagacaatttacckgtattaggagcccaggccacgctacactctgcccacactggtgagcaggaggtcttcccacgccctgtcattaggctgcatttactcttgctaaataaaagtgggagtggggcgtgcgcgttatccatgtattgcctttcagctctagatccccctcccctgcctgctctgcagtygtgggtggggcccgtgcgccgtttctccttggtagcgtgcacggtgttgaactgggacactggggagaaaggggctttcatgtcgtttccttcctgctcctgctgcacagctgccaggagtgctctgcctggagtctgcagacctcagagaggtcccagcacyggctgtggcctttcaggtgtaggcaggtgggctctgcttcccgattccctgtgagcgcccaccctctcgaaagaattttctgcttgccctrtgactgtkcagactctggctcgagcaacccggggaacttcaccctcaggggcctcycacaccttctccagcgaggaggtctcagtcccagcctcgggagggcacctccttttctgtgctttcttccctgaggcattcttcctcatccctagggtgttgtgtagaactctttttaaactctatgctccgagtagagttcatctttatattaaacttcccctgttcaaataagtggctgtgtggtttctgactggtgaatgggcctgactcgtgaatgggcctgactgcaggtctgactggtatacgtgggctctgtttctggtatgagaagggatgtctgagagagatgcttgggtctcggcgtcaaagcattgggtgcccgtgggtgcgtggcgccaccctgcccctctccctcccatgtcagccctttgctggggctgtttttgggttgaatgtggagagtattccattcccccccaaggagatgaaaccaggcttggccacctgcccccggcaagtgaatggagaagccagaaagagtgccaggtttgtcttgcacctggagaaacaagagtttcacacaggcagcccagtgcccatgccagggcagggggccaagctcagagtggcttcattgcttcacatgagaactggtcccacagccaggccgcctcccagacagcctggagggtatcggaactgtgacccgcccaggctgactgctgagccctagtgttcgtgcactggtgccccaccactacctgtttgaggatatgggcctgaggggtcccgygcatctgtgctggacacacaccacaagagtgattcaaatgccggggagacgggagcacactgccctgcatggctctgagcggagtggaccctgccttttcttcccagacattgcgtaaattcagttcacagaggctggggtgtggtcactgtgagctcagatccgggcctccctgcctgcgttggaatcctggccccagcatttaagagctgtatgaccttcaggggacctaccctctcagtgtctcagcttcctcttttgaaagatgagggtcattattatcttcctgccttgatgtgagaagggctttccaggccaatttgctgggagagctcttggttcagatgtggacctgcctctgaattggctgaggttagcttttggtttggtttctgtttgagcagctttgtgctgggctgcaggttcctcttccatgcactgtgtgtttgtacaatgggttctgcaggtgcaaggctgtggcccaggctctgtcccaccagacacgtctgccctcactcatccccagatggagccagcttctctctgggcgagaacagggtgatccaggagctcagattagacagtgccagcctctaccattctccatgtacagagagcattctgttcccagtgaagccacagtgcctgatccctgggaagctggcctggcctttgcccccttccagaatgaaggacggctcggaccaattgccaggrccatctgaactgtgctttacagggcatggcactgccctctgataaggggcaggcatccagtaccccaggacagggtcagggcaggaatccagtgggcacattcagagaggctattttcccatgagtagattcaatcctgatacaccccaccctctccaacctcaaccttcgaaagcgaggtgaggcctttctcagaaaccaccctgcttgctgttggctccagcagatctgctttctggtccacatttaacaatcaattgctcagcacatatctctgtcctgggaggagctgcgcagattgcaggcactgtctttgatggcacagctgatttcttgggaaactgaggcctggggtttaaagcaactcaccccaaatgacagaactagcaactggtagaggccaaatttaaacctaaggaggagaggtaaaggggcaatgtaggtcacagagtacaatgtttgggttagacaggagaataagtttctgagatctgtggcacagcatggtgggtgaccatagttcggaatgtattatatatttcaaaattgctaagagtaaattttcagtgttctcactatgcccacaaaaatacacagrtgaagttatggatatgttaattagcttgatttactcattctgcaatttacacatgtatcaaaacatcacattgtaccccataaatataaacaattattgtcaattgaaaataccattaaaaaatataaatgaccaatgaagatctgaaaagctgttcaatttccctagtaattagagggaggaaagttaacatcacgtgatcctttggcaaacttgatcacattggcaaactttattgcagcagtaactcccagcatcaccaaggtcaacaagaagccagtgttctcctaaacagtacgtaggagttctgttccttcacgtcaagaaatttaccctgaagaaatcaagggaggaggaatatgtttcaataacaatgttggtgcaagtatggtagataataaagttttctgctgggcgcagtggctcacgcctgtaatcccagcactttgggaggccaatgtgggcagatcacttgagttcaggagtttgaaaccatccagggcaacatggcgaaaccccatctctgtaaaaacaattaaaaaattagttgggcatggtggcacatgcttgtagtcccagctattcaggaggctgaggcaggaggatcacctgagcctggggaggttgaggctgtagtggaccgtgattgtgccattgcactccagcctgggccaacagagcaagaccctgtctcaaaaaaaataaagttttcatatgaaatatatacataaaaggatatataccaaaacataaacattaatgctattcatagctgcatagcggaggtaatagatagtggtttttttctgtatttttgataaatgttatttttcagtaacacttctgcaggattatagtagtggtgaggaaggctgcttgcacctggacagatacaatgcatttgtttttaataaactagaccttcctgccctaagcaggccaaggaggaggaggaggacttctggccaggaggggggtttccacgcaggcactggtgccaccgagggccgactgggcttggtttcaccacgttgcctgcagggagggctgtttcaggagcaagagtcagcccttcttgtctggagtactgtcagaggtgggcgtcagtgatagcgacaggaggcagccaaatgcccagcagacagaggtggatccccggtgaagccccacctccaagccaaagacagtttaaagcctgaaagccaagctatccttggactggactgacaacttgtcttgctgtttggtgcacttccctctgatggatccccacccttcacctattttacatatacccaacctttcctaattggtttcctacactgttgtgtccacctttgagtggcatctttgctttaaccttttgtttgtttgttttggagacagagtcttgctctgtcacccaggctggagtgcagtggcgcaatctctgctcactgcaacctccgcctcccgggttcaagccattctcctgcctcagcctcccgagtagctgggattacaggcatgcaccaccatacccggctaatttttgtatttttagtagagactgggtttctccatgttggtcaggctggtctcgaactcctaacctcaggtgatctgcccgccttggcctcccaaagtgctgggattacaggcgtgagccaccgtgcccagcctagttttaaccttttactgcatactcacaagccaatcagcatgcactccccatcctgtacctataaagactccagactcattcagtagaggggagacggcctgactttggggaagatgacctgcccttcctggcccctctctagctcccctctccacttagagctgttttggttgctcagtaaaattctcggccttcaccatccttcaagtgtccatatgacttcattctttttggatgctgggcaagagtgggacccagctagtgtgagtacccagaaaggctgtcacactagccctttgcccttgccagtggagggcagccaccccacatgacaaggcagggggacaactgagctgctaacacaccaccacaccaccacccacaaatggcagaactaaaggagcactgtaacactgcctctggggctttggggtcacaggcaccctcacctgggtgctgcaacacgcctagtctggccacgggtcctgcatggagcttgctcctgtgtctgcacttggaatggccggccggatcccacactcacatgctcacatgctccctcccacaaggggttgagcacagtgagctgagtagacggggcgcccctgctgtgagtcccgtgaaaggaccaagaaaaaccctgcattatcaggagagggaacgtcaggccacagcccggccagattttctggtcaagaggcctcattgaggagaacattccatgcagacttgagatctaagtcccctctgtgtgtttatttcatcaggatgggcagattattctccctgagtgcctcctcagctcacagatccactcttgcccctttcccaaaccttggtctccaaatctgttaggaaatctggatgttacctgggaagaccaagaccgcagtgactgggagctggggacgggatgggtctggcttttggaaactcaatgcctcaaattcaacaatgagccacagacgtggaccagctctttgttgttccaggaagtggtcaggggtgggggtttgcacagggtgagtgtggtcacctggacacacagggaagctgcaagatggctgttagcaagaggcaagtaccaggcaagtccacctggctcacagctttaaacacctccacggcttggtgactccaaggtttcatctccagccatgcctttgtcctgaacgccgctcatgagtccacatgctccctctacacctcactcagcatctgaaaggttactcgacttcaccccctcaatcagtactgaccttttcccataaatgtcagttgctctaaccgaaaaccaggtatcatccctgactcccctccctcacgccacgttccatcagagggcaagcctgtggctgtgcccatgaaatgtccaggatctgaccgctttccatctaccgggtgcccccgtcccaggctctgtcctctcttagcctcatcgcatgtctccctgcctcctgcccccgcccmcagtctgttctcggctcaacagccagactatcccatcaaaatgtgagtcacatgctgtcactccactgctcagaactttccaaggtcttctcatgttgctcagaataaaagccagggtcgttctgagggcctcagccgccctgtggactgtcagacctctcttgctgcagcctcccatattgacacagcaatagccatgcccgccacctccctgggcctctggcactgctccacctcagtcaaagcccagttagaactactgatgcaaatccccacagccaggatcatcaagacatcgrccgccaagctttctggccagggatttcagttgcagaactgtttgcaacacttagctgcaatggaagtgccaattctggaactggtttccttgttgttggctcacttcttcctacccctgagcacacttggaaggctacagacttagataagtgaggaggaggcgggaggcatttgaattacatggttattatttttttctttaactgggagtgaactccactctgtcttgagaaagaattcttgacttgccttgcagatgagaaatgctgctgtggaggctgagtagaggcaggaagagctgccttccctttaagacttggagatgaccctggggagggcagcaaaggcgtctgcagaaccatctgggctgtttccccctggacaggactgcagggagctgcagggagctgcagggagggtcaccacggccctctgtaccttggaatacactaagatctccagggtgtggtggtcctatgcccacacatcccactgttaggagtgtcctcacagttatatcctgccatgtgcgaaatggctgcaagttcaaggctgtgcattgcagtgtcctgtgcaaaaaaaccgtgaaaagatcgggaacaagttatgcaaatcaagaggtgactgtttaattaagtgcatccacatgatggaatgttataaagctctcaaaaagaataggacagtcaactgatgatgaatcacattaacttaataaggaagaaaaaccactttattatatgaaatagatggagaaaaaaggacactaattcataataaaaacgcaaagacatccatagaaaacctacagctaacttcatatttaatgatgagatattggattctctcatcataagatcaagaacatggcaagaattttcactgccacttcttccaaattacattagagatcctagagattgcaacaaggcaagaaaaagatttgaaaagacatagattgggaagaaataagtaaattagcacaattcacaagatttttatgaaggaaagagttaacacaacaggccctaactactatgtttggaaaggcctgcctgcaaggtaggcccttgagtggcatctgggaatttagatttgggtagggttctcaccactctaattgataagagcaggtcactgtgcctagactgttgtacaaatagtatgccttttggttcacttgctttccttctggaggtctagaattttgacacatgccaagcaaaggctggatacggtataaggccagcactcctgaaaagtcctggctgcttaatctcaaatgagcttccctgattggtaacatgtcacatgtattgtcacaacttgttgctgggaaaattaagcatgtcctgcatgaccccactgggagagaccctttgaagtttatgcctggtctcccccagactctactctcatgcaccttttccctctgctgattttggcttttatcctttccctggaagctgcagtttcctgagccttcttagtgaatcatcagacctgagggtggtcttgaccgtccccacaatagttatgcagaaaatcctaagaagtctacaaaaaaagctactagaactaataagtgaatttagtgaggttgcaggatacacggtcaatatcaaaaatctattttatttctattcttgcaaaaaagtaaacatatcaatttttcaataacatttactgtgttgaaaacacagcagacttagaatgaaattttaattaaaaatatggaagacttgctgtattttggaaaccacaattatttctgagagaaattaaagaagagctaaataaataaatgggtgtgccacgtttacatattggtgatgtgtttacatactggttacatatcggactggtgatacagcaccatttcaaccaagtgagaaatgaagaatcttttcaatgaaaaaattagcagttaaaaaaacaataagaacttttgagtcatatagatacccaaacag

SEQ ID NO: 94654 - DNA, 14288 bp, Homo sapiens
  misc_feature (1)...(14288): n = A,T,C or G
tggtggctcacgcctgtaatcccagcactttgggaggcggaggggggtggatcacaaggttaggagattgcaaccatcctggctaacaggatgaaaccccgtttctactaaaaatacaaaaaaattagccaggcgtggtggcaggcacctgtagtcccagctacatgggaggctgaggcaaaagaacggcgtgaacccgggaggtggagcttgcagtgagcctagattgcaccactgtactccagcctgggcaacagagcgagactccatctaaaaaaaaaaaaaaaaaagtgaggtatgcctttacccagaagtaaaaaggactataagagaatactatgaataactgtatgctaacaaatcagatgaaatggacaaattcctgaaaacacacaaactaccaaaactgatgcaagaagaaacaggaaatctgaacagacctataacaagtaaccagatttaatctgtaatcaaaaacctcccaacaaagaaaatcccaggaccagatggcttcacaagtgaattctaccaatcacttaaagaattaacatcaatccggctgggcgcggtgcctcatgcccgtaatcccagcactttgggaggcggatgagggcagatcacctgaggtcaggagtttgagaccagcctgcaacatggtgaaacctcgtctctagtaaaaatacaaaaattagccaggcatggtggcgcacacctgtaatcccagctactctggaggctgagacgggagaattgctggaacccaggaggcagaggttgcagtgagccgagatcatgccactgcactccagcctgggtgacagagcgagactctgtcacaaacaaaacaaaacaaaacaaaacaaaaagaattaacaacaatcctataacagtgtagtgtgcaaagtaaaaagaaatttacaacaatccttctcaaactcttccaaaaaatagaaaacactttacaactcattctatgtgacctgaggccaaactaatatacagaccatcccaagaaaactacagaccgtatctcatatgaatatagatgcaaaaatcctccacaaaatactagcaaacctaacccagcaacatattaacagaattatacaccatgaccaagtaggaattattccagaaatgcaagattgtttaacatacaaaaatcaatcagtgtggccgggcacggtggctcaccctgtaatcccagcactttgggaggctgaagcaggtggatcacttgaggtcaggagtttgagaccagcctagacaacatggtgaaatccgtctctactaaaaatacaaaaaatattagctggctgtggtggtgcacacctgtaatcccagctagtcaggaagctgaggcaggagaatcacttgaacctgggaggtagaggttgccatgagccaagatcgcgccactcactccaacctgggtgacagagcgagactccatctcaaaaaaaaaaaaaaaaagaaaggctgggtgtggtggctcatgcctgtaatatcagcactttgggagaccgaggcgggcagatcacttgaggtcaggatttcaagaccagcctggcgaacatggtgaaacggcatctctactaaaaaatacaaaaattagccaggcatgatggcgcatgcctgtaatcccagctactccggaggctgaggcatgagaataacttgaacccaggacgcagaggttgccgtgagccaagatcgctccactgcactccagcctgggaaacagagcaagaacgtctcaaaaaaagaaaaagaaaatcaatcaatgtaatacaccacattaatagaatgaagaggaaacaccaagtgatcacctcaatttatgaacaaaaagcaagtgacaaaatccaacacgctttcaagataaaaagcatgtgacaaagtccaacactcgttcaagataaaaagcatgtgacaaagtccaacactcgttcaagataaaaatgctgaataaacaaggaataggtggaaacttccttcacctgataaagggcatttatgaaaaatccacaaataacatcatacttaatggcgaaagacctaaagccttcccccaaagatcaggaacaagagaaggatacgtggtttcaccgtttcatctcctcaacattgtactagaagttctagctagagcaatttggcaagaaatgagcttctgcactggggtgggaaaaaaaatggcaagaaaaagaaacaaaagttaaccaaactgaaaaagaggtaaaactattcatagtcacagatgacataatatatacatatatagaaaatcctaaggaatacatgcatacacacagagacacacacacacacacacacagacacgtacacacatacacaaacttttagagctaataaagtcagcaaagttgcagaattcaagattaacacacaatagcctggctcagtggctcgtgcccgtaatccaagcactttgggaggctgaggtgggtggatcactcgaggtcaagagttcaagaccagcttggccaacatggtgaaaccctgtctctactaaaaatataaaaattaactgggtgtggtggcgcacgcctgtagtcccagctactagagaggctgaggcaggagaatcacttgaacctaagaggcggaggttgcaatgaggtgagatcactccactgcactccagcctgggagacagagtgagactctgcctcaaaaaaaaaaaaaaaagttaacacacaaaattctggttgggcacagtggctcatgcctgtaatcctaccactttgtgacgctgaggcaggtggatcacctgaggtcaggagtttgaaaccagcctagccaacatggcaaaaccccgtctctactaaaaatacaaaaattagccgggtgtggtggcatgcacctgtagtcccagctactcgggaggttgaagctggagaattgcttgaacccggggggcagacgttgcagtcagccgagatcgcgccacttcactcgagcctgggtgaaagggcgaaactccatctcaaaacaacaacaacaacaacaaaaattcagttatatttctatacactaacaatgaacaacgtgaaaaggaaattaagaaaacaactccatttacaataggatacaaaagaataaaatacctaggaaaaaattaacccaggaagtaaaaaacttgtccactgaaaatacaaacactggctgagcttggtagctcactcctgtaatcccagcactttgggaggccgaggtgggcagatcacctgaggtcgggagttcgagaccagcctgactaacatggagaaaccctagtctactaaaaatacaaaattagctgggcatggtggtacatgcctgtaatcccagctactccggaggctgaggcaggagaatcacttgaacccaggaggcagaggttgcagtgagccgagattgagccattgcactccagcctgggcaacaagagcgaaactctgtctcaaaataataataataataatagggctgggcgcagtggctcacacctgtaatcccaacactttgggaggccaaggtgagtggatcacctgaagttaggagttcgagaccagcctggctaacatgatgaaaccccatctctactaaaaaataatacaaaaaattagccaggcatggtggtgcactcctgtaatcccagctactcaggaggctgaggcaggagaatcacttgaacctaggaggcaaggttgcagtgagccaagatcrcrtcattgcactccagcctgagcaagaagaacaaaattctgtctcaaataataataataataataaataaaaaataaaacactgaggaggtcaaagaaaatccacatggcagcatgtctgacttctgagcctccagtctataaggcctgtgctgaaaggatctgcacttacttttctcctctttacagccaaggtcaccagtggaaactctcaaggacaatacctgtgtctcctccaaggcccatccctcgtgcctaacacagttcctggcagagaccaggtactcagtgtgtgtttttgctctgggctgcaaaataaaggttttctgatcactcttcaactcaacaaccttggcaccctactgcctgtggaatagtgggacaaacactttatccttatttgaagccctgcccagtctgtcctgacatcccaagattcagagcactctgccctataggggcctccctggctcagcctaaaaagttgagtaatatacggtaattgatttagcagtggcagtgtctgcccttcccacggcctctcctgttctaaagagtccacagatgaattaatccacaaatacttattaagagtatagtggcctgatattggaatgttcaaagccttctgcttaagagtttgtgtgcggccgggcgcggtggctcacacctgtaatcccagcactttgggaggccgaggtgggcggatcaggaggtcaggagatccgagaccatcctggctaacacggtgaaactccgtctctgctaaaaatacaaaaaattagccgggcgtgctgcatgcgctagtagtcccagctactcggggctgaggcaggagaatcgcttgaacctggaaggcagaggttgcagtgagccgagatcgcgccactgcgctccagcctgggcgacagagcgagaatccgcctcaaaaaaaaaaaaaaaaaaaaaaaaagagattgtgtgtgttggggagcagggcatgtggacacaaggtctccgccctaggagaagtgctggagagtaggacaagtaccactacttcggacggggagggcgatgcctccaatggggggcttccctgattcctgcagatcatacgttggcccccaacttcacactggccagaatcccggttctagtcttttccgtgccaccaacccctgggccctctttctagaaggaaagaaaacacctttggcctctgcccagagctacagacacctgaagtaggagcaggcaggagatgcgtggtggataaagaccagagagacttgggatcgaattccactctcacccccagttcagttttcttcagcttgctgctccacaggcaggatgtgaaaatttagatgcctcacccctcgcacctccagcttgctgctccaaataggcaggatgtgaaaatgtagatgcttcccccccaacctctataaaacagggccgacgaggatgggattcgaacccacgcgtgcaaagcacaatggattagcagtccatcgccttaaccactcggccacctcgtcctacgtgacaggtttgtccacattcacttatctactcatactactccgcactttccaagcactaccacgtaagtcgcaacgcagannnnnnnnnnnnnnnnnnnnnnnnnnnnnnnnnnnnnnnnnnnnnnnnnnnnnnnnnnnnnnnnnnnnnnnnnnnnnnnnnnnnnnnnnnnnnnnnnnnnnnnnnnnnnnnnnnnnnnnnnnnnnnnnnnnnnnnnnnnnnnnnnnnnnnnnnnnnnnnnnnnnnnnnnnnnnnnnnnnnnnnnnnnnnnnnnnnnnnnnnnnnnnnnnnnnnnnnnnnnnnnnnnnnnnnnnnnnnnnnnnnnnnnnnnnnnnnnnnnnnnnnnnnnnnnnnnnnnnnnnnnnnnnnnnnnnnnnnnnnnnnnnnnnnnnnnnnnnnnnnnnnnnnnnnnnnnnnnnnnnnnnnnnnnnnnnnnnnnnnnnnnnnnnnnnnnnnnnnnnnnnnnnnnnnnnnnnnnnnnnnnnnnnnnnnnnnnnnnnnnnnnnnncgccgcgcgttcagggcgcgcccggtccagggtgcgcgcgccggcggggagggagaggagtgcgtcccgggaagccggcggggcccgggcgggcgggcgtctgcacggcgcgcggccgagcggcggggccgtggctcctcctccctcgtagggggcgagccggcgcgccgggggctgggggcggtggcgggcggcgggcggcgggcggcgggcggggcggcgctcggggctcggctggcctcggctcgcctcggctgcgctcggcaggctgcggtaaatccgggcttgcggccgctggcgtagtctgtggccgggtggtcgttgctgcgcgccccgagccccgagagccatgcagatgtcctacgccatccggtgcgccttctaccagctgctgctggccgcgctcatgctggtggcgatgctgcagctgctctacctgycgctgctgtccggactgcacgggcargaggagcaagaccaatattttgagttctttcccccgtccccacggtccgtggaccaggtcaaggcgcagctccgcaccgcgctggcctctggaggcgtcctggacgctagcggcgattaccgcgtctacaggggcctgctgaagaccaccatggaccccaacgatgtgatcctggccacgcacgccagcgtggacaacctgctgcacctgtcgggtctgctggagcgctgggagggcccgctgtccgtgtcggtgttcgcggccaccaaggaggaggcgcagctggccacggtgctggcctacgcgctgagcagccactgccccgacatgcgcgccagggtcgccatgcacctcgtgtgcccctcgcgttacgaggcagccgtgcccgacccccgggagccgggggagtttgccctgctgcggtcctgccaggaggtctttgacaagctagccagggtggcccagcccgggattaattatgcgctgggcaccaatgtctcctaccccaataacctgctgaggaatctggctcgtgagggggccaactatgccctggtgatcgatgtggacatggtgcccagcgaggggctgtggagaggcctgcgggaaatgctggatcagagcaaccagtggggaggcaccgcgctggtggtgcctgccttcgaaatccgaagagcccgccgcatgcccatgaacaaaaacgagctggtgcagctctaccaggttggcgaggtgcggcccttctattatgggttgtgcaccccctgccaggcacccaccaactattcccgctgggtcaacctgccggaagagagcttgctgcggcccgcctacgtggtaccttggcaggacccctgggagccattctaygtggcaggaggcaaggtgcccaccttcgacgagcgctttcggcagtacggcttcaaccgaatcagccaggtgctcataagggagagggcaggggtaatggggcaggaggggtggtggratcagggagttatgaggagtggccctggatggaaaggaggcaatgaagcaggagggatcatagttcaggaggtgggtggatggtgtggaagatccaggatacttccagaggggtgaggacgctggactgtggctttagggaagtcagtctcaggcctgtcaatgtcatcaaactttgctaacctgtctttcctcctgcaggcctgcgagctgcatgtggcggggtttgattttgaggtcctgaacgaaggtttcttggttcataagggcttcaaagaagcgttgaagttccatccccaaaaggaggctgaaaatcagcacaataagatcctatatcgccagttcaaacaggagttgaaggccaagtaccccaactctccccgacgctgctgagcycttccctcccctaatctgagaagtcagcctcttggctcctcaggccaccatttaggcctgactggggtaagaaatgtcgctccactttacagaggtagctgtggtgttgaaacactggacttggatatggggtgctgggatcgattcctagctttaccactaactagctgtgtggccttgagtaaatccygttacctctctgagcctcggttaccctgtctgtaaaaagggaggtgagaatacctacctcacggaactgttgggaggctcagatgagatgctatatgtgaaaacattctgtaagcttcgtacaaatgtgaagtattaatattatcgcagtattattgttgttattattattgttattattaacaatcttgggtgggtagtaggagagcaaaaagtatgaatgggatggagctaagaagtctgaatacttaatgaaatggactttttggaaagaaatcagaygaaggcataaaatttagttcttagctcttgaacagaagcctaaaattcctggttctctcagggcttcgccttcaagggttctggaggagggaagggtctgcaggttccatgggtgacagcctgagatctgtcccttcaacgggctgggctgggtatgtgcctaccgatgacaatgtgtaaataaatgcgtgttcacacccacagctggctccgttactctcctgagctgggggtggggggatcggggccggcttctccccttgcacgccgtggggagatggccgcggacgaagggcaccgtctgcaaagcactgaaccatcagggccttccctgcaggccgaaggcctgcgcgaatgtcggccagttactatggagaccggcccgcggtatcccagcatgcctcgggaccaaactgtccaactgtgagcatccccgacggtcgcctcctgatgacgcacacggaagcaccgmtaggctctgcctcccgaagaaaagggagccgcgcagcgcctacgggagtccggcggcagcagccggtaccggcaaccacgggcagctctcagggaatctccgtcgtgaggccagaggctccagtccccgcggtgcgtatcgtcatgcatggcttttggttcgccctctccggttagtcgagcagggccggcacaacctcctcctccgaggccgaagcagagatttaaccggcctgacgcgtgctgggctgcgggcgagccagtgatattccggcccgctccggcgcatctagaagggagcgggaggccccctgggcgctgcggagaagctggattgacctctgcgagagtggggagggtctgccttccctaggggcctgccccggaggagctgccattctgaaaagataaattgcctgtgtacagcgctttacagtgtgcttttccatcccttaccacctgtgagctcctcaacactcagagcaggaatggttatccgctttttgcacccggggtaaggtgggaaggttgtgacttaactcactcataatcagaaccagggggaggaaagaaaggcttctggaagagatagacttaagctgcatcttacaaagtgaatatactaacagtgaagaggcattgcaaatgttgggaactgaggcttgataacgggaagatgaagctggtttagagaaccgagcctttcaagtcaggtgcaggtcattagtgaaattgttgaggaatatgactaaacactcacctaggccaggcttactatacacaacttgaactggtgtcaaggaaagcttgctaccattacagggacctgggactaccgaaaagtaaaaactaatgtctgtctcacaaaaaatttttttgttaaatttgtatttgcaaatcctccagtcatcaagtgaaccagcactgtgctaggtaaataagttacatgtgcagcccctgccctagtgaggctcatagactgattgcggggacagatatgagaacaggcaaatagatataaacaaagcttcctggagggagtggtgtctgcactgttctaaaggactacaaagcagtgtccagagaagttggaagaacacaataaaatagaagcctgcaggaggttgagagattatctgctgagaggactgttttcttcttcttaggtgatctcttggcagtacttggcactatcagtgcaattactccttggcagtacttggctttcttctaaaactctctttctccaccacttcgggttttgcctcctcctttgtaggggtctcctcatctgcccctttggtgaccctgggcgtcttctgatcacacacattgtgccttgctggttgcaccttctcctgtggcatgaagaacttgctgtatgctgacgaccaaatccctgcagctcagatttctcactgagacttagacccatgttcccccagctgctttccttctcttatttctgggtctttgctactgactctacctggaatgttccctcaataagtgcagctcacccagctggtccatctttgtctggaagcctccctgctgcatcgggctccaggtcctggttatatacccctcccttatgcccctggtcttaactctcctcctatcatggttatagtgtgctcctttgcccctgtctcccaggaacttgtaaactccgtgaggtcaaagacattcacacttgggcgcctgcataccatagcgtctgacggtacctagcatatgttagatgttcaatacatgttagatgagtcagtaaaagaaggaatgcttaccagtgttggatgttgccgagcagacaattaaaataagcactgaaaaatattggcattagccacaaggaagtcattggttaatgctacgggatcagtttcagctgagattgaggacatcgaacaagtgggaggtgaaagtaggaacagccagtgttcatgagaccttgaaaagtgtaactgtgaagtggcaaatggagcagttaggtggaatgggtgaggttttgtgtttctgtgttttgttaatgctaggaagtacccaagcacatccaaagtttcatgggaaggaggttgctaagagttagaagctgaagacacagaaaagagaggggagcactgatgacctgcggtccaagaggaagcagaaggagatgggatttgacccagagcacaatgaaagacaaggagattgtaacattatctggaagagaagccgaggacattataggcagaaggaacagctgaggcagagggtggatagtggaagtgcaagcactagccattatatgttgggatgaaggagctggaccggtaggtcaagtccagtctgggaaagaccttgaaagccccagttagaaatttaggtccagtttgggtgtggtgcgggcgcctgtaatctcactactcaggaggctgaggcaggagaatcgcttgaacccaggaggaggaggttgcagtgagctgagatcgtgccactgcactccagcttgtcaacagagcgagactctgtctcaaaaaataataagaagaaaagaaatttaggtccagttgcaaaggcagtggagagtgccccctgggcctttcctttctgtggatcacagccttggccagtattgctaggattaggatcaccagtgacatccaagagcaggagcagttccacagctcccagccttctgtgagaggtgcagatggccatttgcacccttgtcacccagtttgtgctcaaggtgtggccaggccagttacttccctggctttccccatctgggatcgagttgtgttcagctccctgctgcctctttccccctctgagctgtgggcagccataagtgatagctccattccttctcccagagtccagatgcctgtccagcctccaagcaaagacacagaagagatggaagcagagggtgattctgctgctgagatgaatggggaggaggaagagagtgaggaggagcggagcggcagccagacagagtcagaagaggagagctccggtgagcccctacacacacagacacacacacacacacacacacaagagcccctacacacacacatgcacacacacagcccctacacacaagcatgcacgcacatgcacatacagcgcctacacacaagcacatacacagaccctgcacacaagcgcacacacgcacacacagcccctacacacaagcacgcacacacagcccctacacacaagcacgtatgcacacacacagccccttcacacaagtacacgtgcacacagccccttcacacaagcacgcacgcatatgcacacacagcccctacacacaagcacacacgcacacacacagccccttcacacaagcatgtacgcgcacacacacacaggccctacacacaggcatgcatgcacacacacacatgcaggacgcacatgcacacatgcgggtacccaccactcctccccagagctagcccttactggcctcttgtcccagagatggatgatgaggactatgagcgacgccgcagcgagtgtgtcagtgagatgctggacctrgagaagcagttctcggagctaaaggagaagtgagcgtggggacaccttgggctgggtctgcgaggatctgggatgaggaggtggtgggcctggtactgggcaggcgtggttggtgcccaggaagtgcgcgcctaacaccgggcttgctgtggaatgggtgctgggtatgtgtttgcccaagagcgatgggtgagcaaatgggtgcacggctgcctttttaccacgcaggttgttcagggaacgactgagtcagctgcggttgcggctggaggaagtgggggctgagagagcccctgaatacacggagccccttggggggctgcagcggagcctcaagattcgcattcaggtggcaggtctgtgggtggttctataccctcttcccctcccagaacccgtggcaccctgtccccttcctctctcgttcctgcccggccttgccctttgctctcagccctcctatgtgggcaccgggctccccagccaagcagggaccctcctccctttctctgcagggatctacaagggcttctgtctggatgtgatcaggaataagtacgaatgtgagctgcagggagccaaacagcacctggaggtgggcctgattgggcacactgggggtgaggcagggcacaaagcctgaagtggcctcaccccatccgtcctgctgagctattgccccctcttccagagtgagaagctgctgctctatgacacgctgcagggggagctgcaggagcggatccagaggctggaggaggaccgccagagcctggacctcagctctggtaagcgcgagagcctgggcaccccggaactgggccccgctcagtccacgcccacccctctttgggcttcagatgtcctgaagtcaaggggacagccagaggacctgcctgttggggtcagtgtgagggctgaaggagaccaggcctggaaagggcctggcacataatgggggctcaagcagagtgggtctccctgcctcttctgcccctgctctttccaaaacaggtatcagtgtgacatgcagtcacatgcaatagctctagtcccctccatgttcatagtacctgtgttcatgtggagtcctggggtggcaggaattgtygtcatcccactctccactaaacagatgaggctcacagaagtgcagtgacctcttcccagggttgtgcagctgtgcaggcaggacctgaacagccctaaggggcttctaccccaagcccagggtggtgatgggacaggggagatgaggccaggccggcccatggtggaggcagaggctacagaaaagggagtatcctgtgggccagcaccccaattctaactctgggtctcggggcagaatggtgggaygacaaactgcacgccagaggcagctccaggtcttgggactccctgccgcccagcaagaggaagaaggcacctctggtttctggtatcctttcacccaaggtggcctaaaagtgggcaggatgtaagggtcaactccagacccagggtagggggttggaggggacatggaggacagtcacactagatgcactcgtggttgcttggtgtcatgtgaatatgtccaggcaaatccagctgtcagcagtttcttacggggtcctgggtctctctgggctatgtgaaccctaggaaaacagaaacgggctgggctccgtggctcacatctacagtcccagcactttgggaggccaaggtgggtagattgctcgggcccaggagttcttttcgagaccagcttgggcaacatggtgaaacccatctctagaaaaaataacaaaaattagccaggcgtggtggtgtgcacctatagtcccagctactctgaaggctgaggtaagaggattgcttgagcctgagagatcaaggctgcagtgagccgtgatggtgccactgyacttgagcctgagtgaggtttggcctttgaggcctttccatctcccggggttgtccgagcgggtccccagctttccctggggagcctttgctcatatcccaccctcctcttggaagtcctgcctgtcccgactgtccagggctcatctcaaacgttacctcctctgtgaggcctcttctggtcttaccctggtgcctatggcttcactttcctgtgtgcttctgtgccctaccatggggtacccacatcccagagggcactggctgcctc

SEQ ID NO: 94655 - DNA, 24221 bp, Homo sapiens
gagctccactgtgagctgcctcacagtggcaagccttggcattaggcaagccaccctggggcaatcaagacttaggctttttttttttttttttacttaaaccgtgtcactgacctaagctgggttgattatttcacttttttaaaaaagaagcatattaatgccacgttttctaaaacaataagaactattatggtatgtgattccacaccatacactttattaattacactcttgaagtttaaattatttctaaatagctgtttctaaaagcatgcatggaatttataactgatgactgggaaatgtactgttttaatagcattaaatatattcatctttattgtttgttaacaatgttagcatttgaagactagactggcaatgtcaccttttatcaaccttccctacaacctgtttatagaagaaaaggtgggggggggggtgggttagaactaataaccctaaaaatactgttattaattcaataacacctctggaaactacttctttgttataaataacactgggcacagtgaaatggaaactatcaaatacagtagaacttaaaatcatgtagtacgaggaggtttgatttggataaaaagaccttgaacatattaagttaaacaagccagacataaaaggagaaatattgtatgattccaccaatatgaggaatctagaacaggcaaatttataaagaccgaaagtggattcgaggttaccaaaggctggaagggcaggggaatgggaggttattgcctaatggttacagtttttgtttgggataaatgaaaaagttttgaaaatagtggagaaggttgcacaacactgtgaatgtaattaacgccactgaattgcacacttaaaggttaaattagcaaattctgttgtattttaccaaaattttaaaaattaatgtatataccccaaatcgtacactttacatgggtgaattatatgtgaattgcatctcaataaacatctttttaaaaagaaattcatgatttggtcttgaagcattcaaaggagtctaacgttgaaaagggcagagacttcgtgtgatcctgggaacaaaactaggacctccaaggcctcaattacaggaggcagatgtccactcaatacaaggaagaaacaacagccaaagcgtccagaatcatcacgtgtcttctcacaaaggggaggactatcattagaggtgttttagcaagggcaaagatgcccatctgtcaggaatgcacagggcctataaaggcccataaacatctttgtcttcgaatgctaaattgtgtctatgttttttttttttttttttttttttcaggtaagagtccttatgctagattctcaaaagggataataaccctaaaaatgataaaagtcactattattgagaaaattccagtatttcaagtgagatttcactagatctaaacacttctttcaaatctgaaactgtaaacccctatagactatactccccttaaggagtgtagtcaaaacaggattcactacatattaatacaaatgacctgtggtccagaactgactaggggtgccctcattatggaagtgaaataaacctgtaagaatgtctttgggctaaaatttgggtaaaaggaagataacgcataatggggcaaggccaagtcagactaagatgctcctctcctctgttcccaactgctactcctcactgtactgagcgagttctttcccatgtctcggaacttaaaacactgggaatgccccaggactcaatcctcagatctgttctttgctcactccttagataaccttaacccgtaccacggttttaaataccctctataaactgagaacacccatatttacaatttccggtttgaaagtctctgaatttcagacttgtatatcctattctctcttcaagacatctattttctttgaggtgaaattctcataacataaaactaaccattttaaagtaaaaaactaatggcaattaacacattcatcatgttctgcaaccatcaccactacctaattctaaaacattttcatcacctcaaaaggaaaccttgtaaccattaatcagttgctccccactctccctttcgcccagccccaggcaaccactgatatgctttctatctctatggatttacttattctggatatttaatataatagaatcatacaacatataagcttttgtatctgacttctttcacttagcataatgtttctgaggttcacccatactgtagtatgtactggcacttcattccttttcatggctaatatttcattgtattgatatacattttgtttatccattcaagcactgataaacgtggcttgtttctaccttttgactattgcgaatagtgctgctatgaatgtgtgtacatttggtttttttgaatatcagtttgcaattctttggatatacgcctaggaatggaattgctgggacacacagtaattctacatctaactgccacttgtggttttgatttgaacttctctaataacgagtgatgctcagcatcttttcatgtgctttttagccatttatatcttctgtttaaagaaagaagtcctttgcctattttaaaattgggttgtctttttgttgctgaattgtaagagttctttatatattctggatactggacccagatcaaatgtattatttgcaagtaccttcttccattcttttcactttcttggtaatgttctttgatacacaaaagtttaattttgatgaagtccaattagtctatttttctttttactgcatgtattttggtgtcatatctaagaatgtggtgccagccaagcacggtggcttacacctgtaatcccagcactttgggaggccaaggcgggcagatcacctgagatcaggagttcgagaccagcctggccaacatggcgaaaccccgtcttgactaaaaaaaaatacaaaaattagccaggcatggtggcggatgcctgcaatcccagctacctgggaggctgagtgagtagaatagtttgtgaacatcggtggcagaggttgcagtgagctgagactgtgccactgcactgcagcctgggcaacagagtgagactctcaaaaaaaacaaaaaacaaacaagaatgtgctgccaaatctaaagtcatgaagatttatctgtatttttttcctaaaagtttaatgacatagctcttatatttaggcctttgatctcaataaaagtataggccatttggagttcatttctgtatatggtatgaagaaagacatctattcttttttttttttcatctattctttctttcttgagacggagtcttgttctgtcaccctgactggagtgcagtggcacgatctcggctcactgcaacctctgcctcctgggttcaagcgattctcacgtcttggcctcctgagtagctggacaggcacgcaccactgggctcagctaatttttgtattttttaatagagacagggtttccctatgttggccaggctggtctcgaactcctgacctcaagtgatccgcctgcttaggcctcccaaagtgctgggattacaggtgtgagccaccatgcccggcctagacatctattcttgaatgtctatcaggtctctcaaacccaaacttctagtattcctctaccaaacctgctcttcccagtcttccctatctcagcaaatgctcacgttaaaaatcttgaagtcggctgggcgcggtggctcagagcctgttctagcactttgggagaccgacacaggaggactgcttgaagccaggagttcaagaccaacctggccaacatagatttttaaaatcttgaagtcgtccttaagttctctttttcttttacaatctacctccaaaccattagcaaatgatgttggcttcaccttcaaaccatatctcaaatttaccatctcctcctctattaatctggattattacaacagccttttaactggtcttccggctttcacctttgcctccccacaatctaatgagcagccactgatcctgttaaaatttaagtctctgctctaaacccttcaatgacttcctatttcactcataataaaaaccatagtgccttccaagacctacaaggtcctacctaaagaatttgcccctaccatacacacacctttctggtctcatctcacctctctcccagtccctctccctggactcctggttgccctgtctttgccttctttggaatgctgctgcccaaggtatctccatggctggccccttcacctggtctttgctcaaattcaccttcttagtgaggccttctctaatcactgtatttaaaatagcaattgtgcgtcccttgatactacttattcccctaccctctaacctttgtttatttttctccacagtatttatcatcatccgacacactacgtattttacttgtttattccccccccattagaatgtaatcttcatgaaagcaaggacttcgatttgttcatctgtaacccccactgctcacaacaatgccaacacaagtagaccttcaataattaattgaactaattaataaataacataaattatagtcgcccgttgctgcacctgttcccttactggactgagagctttctgcaagcagtgacacccttattcacccatgaactcccagcacctaacatttgcgctcggcacatagtaggcattgattttaaatgaatgaaccaacaagacaggcctatgaaacatctcagcctttcaaacacagtccctatgctatcattccctaaatatgtcagtgtgtgggggttatccgaaggaagaggttccaataccaatttccacgccctcacgcgtacaccctctgttatccctacaatacccaagcgagaaaatgagtaacggtgacagccagaaaatgaatcctgaaccgtgcaatgacaagtccgaaggagaaagcagttgcgatgagatgaaagaaggtagcgggactcaaaacagaaacactgtcccgggggtggtggcaaggagagggaaaggccccagtggccacaaccatagagtcctgctctcttttgacagctaaggaaactaacgcccagagaggaaagcgactcccccgaggtcacacagcaagtgagccacggcgagaacccacagcatcccgcgtccgcgcgccgccccagctccctcgcgtttggggtggtgtcctccgcgcagagcccccaccagcgcacgtgctccgaggtccccggacgcccgcccgcccacggctcggggccggctccccatctcggtccaacgctggggtcgacggcagtgcgctgcgcccgcctcctgcgcccctctcagccagcccgggagcccgccaggggccggcggctggcagcgctcaccgcgaaggtgggcccgggccgcccgctctgcgcccgccgcttacctggcagggtcccgcgggaacctgaagaaggccaagtcggactgcgtgctcttccgcgtgcagttgggggcagcgcagaagttcggcatcgtcgcccgcccgccggccggcccagccctcccctccccgcctcctcagggcagtccgcccgcccgtcggggccggggaggggagccaggccggccggccggctcggcagggccgacgcgcgggggaggggcgggcgggctagaagccgcgagggccaggaggggtgccgcggtccgaggccgggctggggacgcggctccacagtgctgtgagcggccgggaggatttaccgccgccgccgccgctggtgcacctcccgcccgcccgagacgctgccgcctccttcccacaatgcaccctgacgcccgggggtgccctctcttccctcagccttcctcccccgcccctcctttccgccttctcagcaggcgggcacgcgcaaggaagcgcgcctgccggggtgtggcgaggcggaggcgggacctggcgcgcgccgccgcagtgcgactgcgcacagtctaatccgcggggagagagaawtgcgcatgcgcgcctgtctcccgggacgctagagcaggcggttccygggctgctccggtaggtttggcgtgcgcgggtttctgcagatctagggcgagcttgcacgttacatcaccgatgcatctcttcttgcttgcttaatttgccaccacttaggcctttcttgcagaattcgccatatactccttaagggccgcggaatcggagcgaccttggtgactggcaaactctcggcagatgtgcgtgcactggtttgatgcagacgtggttgtaggcgatttaatttttcccagctttgcagcgactgttggcttcccagaacggatctccccagcctcgactggaagctgagggacaaaaattcataaaagcaattactctttcccggcgaggcttctagaagagcaagaagagcgatatgattacacctgcagccctataaagattgatctgtccgtctttcccttacagtcgtggcctgttaaacgttcctgtgttgttcagtgccagaatgagtgaccgctatttagaacaaaggattagtatcaaattttgcgtgaaattgaacaagtctgcaagtgagacccaccatcttttaaaagaagcttatggggatgaagtcatgtcaagggccagagtttttgactggcacaaaaggtttaaagaaggacgggaagatgttcgagatgatgcccgaagtgggcgtccagtcacccaccgaacagatgacaatatccagaaggtcaaggacttggtttgttcaaacaggcagttaaccgtkaggatgatggctgaagagttaaatttagacaaagaaactgttaggctcattttgaaagaaaacttgaacatgaggaagatttctgcaaaagttatttcgggtgttttgaagggtgagcctaaaccacgaaaacttgactttcggtccgatctttcaaaggaaactaggaaaaatagctcatgtttgaggaaaaaggtaacaggttctgaaacatggagttatctccagggtgaagctggtggggaaatgcccctgccggtatcccatcccagagtcyactactctgccagtcagcttctgcaggcgtcatcttcaacaagccttccccccagggtagctgagaattggttcaccccatggtgagaggaatgtgagttagctgaaccagaactaggatgctgcctcactgttaggcaccttctttggctgctcacgtatttttcagtcttcaccactcctccctatgtgccatggccctcctcattactctttgctggactcttggaccattttccttgctgttctccataactttgaaaaacttttggctgttcccttctggtatttgcttgttcttgatttcttttgctcaacaagtttggatttcttctctgcccagaccttagcttgttgtggctgtcctgttcctttgttctcaaccttctgcctcagaggatcatgccagtgagaagagaggaacaggatctcctggaatctgtatctctgtgcccagggaagcatgcttttctgggaggaccccaaaagaaggcttacagtttcagcctgctttgcagtcagggcctgaggtatggtacagaaggtagtagcatgctggtaytactgaacagtgctgggcctaggggctgatctggcccaratgactcagtaggcacccttaggaatcaggggttggccaccaatactgatcttctcacaggcctacacctcacagaagagctgggtttgtttcattctagtcctatgctttggacctccactcatttgggtatcacccctgttggaagaggaggatctggtgctagaaaatataaacccggggacccaggcaaggctgtgttgtgtggggaggaagaccaggtggctctctagtccctgaattaagggagcctgctgcctatgtgcggattcccacacagcagcctgtttttagtaactaatgcctatagttttgagaacttgctgtttttaggacactgctgggcattgacaatgtggaggttatgaacaagatctccaagggctgatgggcttcatggatgagatggttcttgaactggatccatgaggatgggtgagacagggctgtgaaattagggaaagcttccggggcaggtggaacagcatgaggcttccaacctgcatcagtagaaaatgacactggccaggtgtggtgaatcacgcctgtaatcccagcactttgggagactgaggtgggtggatcacaaggtcaagagatcgagaccatcctggccaacatggtgaaaccccgtctctactaaaaatacaaaaattagctgggcgtggtggtgcacacctgtagtcccaactactcaggaggctgaggcaggagaatctgttgaacccggaaggcagaggttgcagtgagtggagattgcgccactgtactccaacctggcgacagagctagactctgtcccmmmmaaaaaaaaaaggaattagaaaatgatgacactattggctaaaataacaaagtttaaagaggaagataatggtgttgcagcagatgaacaatttgggataatttgctttctctcctaagcctccaactctatgccacttgttgttaaattgcttcccctgagtctgtgaataggtttgtaacaaccaatttgatatctgattttccatttggaccccgacaagcagtttctgcaagttcaaactctgtctcttctcttcctgcctctgccaggatttatggaatggaacttttcccaagtgggttccaagtaataccacatagactggaaacattcagggggcaggggtttggtaatagcatttcacagaattggccagtctttgttttactcaaggatttttagatataacagctcctcttaaacaatattgcttgatagtagaggcacaacactcattcatcacagttacttttagtgctgttctttcactttctctactcacctccaaaaattacaagttcctcattaacacctgtttttgttttgttttgttttttgagatggagtcttgctctgctgcccaggctggagtgcagtggcacgatctcagctcactacaacctccgcctcccaggttcaagtgtttctcctgactcagcctcctgagtagctgggattacaggtgcatgctgctacacccggctattttttgtatttttagtagaggcggggtttcaccatgttggccaggctggtcttgaacttctgacctcaggtgatccacccacctcggcgtcccaaagtgctgggattacaggcgtgagccaccacgccgggtcaacacctgttagttttgagacaccttgaaagctagacgttgtcccacaaagagaagatactgtgtaagaaaactcttaaaccaaacaacagcttatagacctccagctccttaacagtttctagacattccatttcaggacaatgaagtcttcctacatcagatgcggctctaggttgcccacaagcacttggcaccagggacactgcactttaggaacaaagtccccaccactagttcttgcagctttgttgctgaacctcatagtaatccttgctaaggcctacccagtggtaattgttgcagatttatatgctcctggtcccaggccaggatcccacaaccatacctacaggagttgtttctaacctgttattaaacagaggtcctgagacaacttacttstggattttattccagtcctatgaacagggctggtatgtccctgccagtgatgctggaccaagacccatggtggagtgtagagtaccagaagctatgttggtccagacatggtttagacacagcaaccagaagcaggtaattaggagtgtgaattcaaatggttccaattggctataatgaaaaggacttatccagagcaaaccattcacatttggctgctcagaatttctaaacccaagggtagagcatgatctgggcatctccaaataggaaagttcttatatgagtactcctaatgtgtccacccaccaaatctattttattgctgatgcacgttttgccctggcctgcaccttgctgcctaggcctcttgagctcctggtcccgtagtctcacacatccagctatgtgtccgtcacaccccaggctcttgtccttgactatcttcagacacctctcagtttattcttcacagtttgctcttactcctctctttccttgttgctttgttttctggtcctgggtcacatcttcagtagctgcttttggtcactttggtgtgctgatccttgtattgacctttgggtcatggttttccacttaacttacaactcttctctgattttttggatccttctttcagctccccgcttcagctgctgagtaaggaaattgtctgctccagccctggccccaggttgccttcctatcttaaagaagcagggtggggtgacatgggggaattatgtgttgattttgttttttctaagggacatgggcaccttagccaccctcagttgcactccccagaggcacccagtgtcaccagtttctcaaggaggcaatatggttacctctagtagcaagagtcatgaaacttcttcagagttataacatccaaagcccattctcctagcaactgtattttccctggcaggagaaactccacctaaccacaatagatcaagcctggctttctgtgggatgtcagtaggagagctggccatctgcaaactttctcaagcttaacaccatcggtcaatgactccgtttggctttcaggttgatctttgtccccgcccccacgctcattctaattcaaagtccacatggaatgttttatgccacagctgagcgtctaagaggaatacatgccttctggggcagatcatcctaacactgattttatgcaattctccccttccatcaccccaccctaccttgcttcatttgccccactagtaatgatcaaaaagagaaagaataaaatgttcaccaaatctgtgacttagaaaaacatgtggagggttctgccatcttctgaattctgatcctcactgagtcctcattgaaatgttatttggggaagaatgtttacctggggcctccttcccagaaactttttttcagatgaatttctagtcaaagactaagacttgcctttggaaatgcctggataaatctggatgctaaatgacttgaggacacctaataaaggaatggggtactattggggaattgtctgtcattgcattacaaatgctgctcagtctccctgctatttgcagacatcatcaccagagagtttcactaggctcgttgggattgggtctcagcaaggtcccatgtgactcaataagagcccacctttgctgctaaattgtgtatgttactgtgcattctccaattacttcttcttcagtcagcccacccagattttaccaggcgtttatatcttttctgaggtaaccatcatgtatttatgttctacagtgtctcccttatcagatccttgcaaatactgtcctagttgaatcacccctttcccagtattaatatccggaaacaaaaaatctatagtggggagctccagtgggtcccctccaaggactcacttgggcatagtccagtggtcaacagacttctataaaggagtctttatgggccatatggtctcttttgccactaaacattttagtgcaaaagtagacatagttaatatagaaacagatgagcacagctgtgttccaataaaactttataaatggatactagaatttgaattttatatagtttttacaaaatactattttgatttttttaaaccattgaaaaatgttaaaaagaggccgggcacggtggctcagacctgtaatcccagcactttgggaggccgaggcgggtggatcacctgaggtcaggagttcgagaccagcttggctaacatggtaaaacctcatctctactaaaaatataaaaattagccgggcgtggtggtgtgtgtctgtaatcccagctacccgagaggctgaggcaggagaattgcttgaaccctggaggctgcagtgatccaagatctcgccactactccagcctgggcaacagagggagactccatctcaaaaaaagaaagttagacattcttagcttttaggccatagaaaaacagatggcaggacagatttggcccatcggctatagtttgatataacccccagtctagtgtatatgaagtgtgtatataaaaatgacagatgattattttccatcaataacattattaatgccacattgatctggcagtgtctgacaatttatttgtggaaattgtgggccaggcacgatggctcatgtctgtaatcctagcactttgggaggctgaggcgggcagattgcttgaggccagaagttagagaccaacctgggccaacatggtgaaaccccatctctacaaaaaaatacaaaaattagcctggcatggtggcacgtggctgtagtcccagctacttgcagggttgaggcaggaggatcacttgagcccaggaggtccaggctgcagtgagccatgatcgtgctactgcactacagcctaggcgacagagtgagaccctgtctcaaacaaaaaaaagaaattgtggaatattggagggactctgtggagccaggagagtaaactaaagctgaatgattggctattttaccttgaaatattctggttcacaaaataaattttgtgctgtttttgactaaaaatgatattataaaaccacctatattattcccatgtaaaatatcaaaaccagtgttggcaacactaaaactgatgccaagctgcaaccaacaataatagaatgaactgaaggtagtcccaaaaatgatttgaccatgggtagcatttgaataagcttatgttatcacctattaaagtgtgtactatggagatgacaaaactcactgaaatgtattttttgcatgcttgcaaatatatatatgtattacagatacatatgtgtatttgcaccttgcaactggtgctgagatctgtccttttaggtaagtgtatttgtcttttcccctagagagctctttattgtgtcacctttatttaaactgattttccaaagttgtagtagaatctcagcattgaacagtccattacaamaktgtctgatccagycagtcatgtttcctatgagttcaggagtaactaaaccctacagctgctgaaagattgcatctgaaagaagattctgtgttaattcactcaacaattttttattgagtggctgtatgggccagatgctatcttgtgtgccgagatacagcagtgtacaaaatagacacaggccttggattagatggtctgaaatctaattatattactcttcactcttgcaaattttctgttccgtgtgtgcacactaacccattgttaactgcatacctggaaataggtatgactgttgccacatgcctttgtgctctggtcttgatgcctctccagctgcattaataattwgaggactgcgtgtttcatttaaattttattatcctttagacagatctatattggcagaaaaacacactggcaatgttagaagtgtagactggcaatggttttctgaaaagcaatttggcaatatctatcaggagctttaaaaatgtttagatcctctgatcctccaattccacttctgggaatttgtcctaaagaaatagtctaaaatgtgggcaaaatcaaggcttgacaatcttaaagtccaacagtagaaaattggttaagtaaattacagtatgactatccagtagactgttgtgccatcattataatttatgtttctgaagaatatttgacagcatggcaaagtgcttatagtgttaagtgaaaagagtgatatacaaaattgtatgtataaatccaaaaaatgacttttaaaaagatggaaaggatatgcaaactctgggtagttggattatgggttttcctggttttatgctttaaaaaattttctccagtatattactacttatattatcagtaaaaatcaatagcatctagagctggcagtggagagattgaggccagatcactagtttggtccatgaacaattaactggctgggtggacacagaggctatatgatcttgtgttggcagcaaggctgggacagaagggaaaaggacctgcccaggaggagaagggaccgtgtgactatgtgaccataatccctacaaaaaaacacaaagtgttaagggaagacactgtggstggcatgctcttgtgatgtagtcgtaggtcggtaaaagaccacttatgaatcaagtatattctgacaagtggaaaaggatatgaatgctctcctgggtaaaattaacctcctttgcatttcattctcacattctcgcacaaaatgaattatcaagatggattttataatagctgattctctgaagaatccctgagactttgtatgattctttagtatagcagtggctttcgatgtgccaagtctacctcctcccatactgggacactcaagcaacacagatgtacacgggaattttgggtattctatactgagaatactgcacacatatcgttagtcatcttaatgttgtaacttaccaaactcttaaggtttgcaaatgtgattttgttggcatctagaaccagtgtattttttatttatgtctgaaaaataatcattgtggggttttaaaatgaaaaatcatgtagctaatgcctatccatagatgaaattgttatgttgggaaaatgtgtacttaatctttgctttagtaaaatgattattataaaaatgttaaaggtctcctcagtgaaattttaaacctccaaatgagtacacaaggtaaatacatattttataggcctatagctcatataatcgccaagctgaaagagttctttaagatctaagtataagtcctctggtctatagaatgaatgagtgaggcttgggtttcagttctggcttcttaactagctatgtgactttgggcagttcatttgtaccctctaaggttgtcagttaattcatctgtaaaagggaagtaatgccatctatctcatggagttgttcattttgttcatttcaacaatatttattgagtgcttatctgtgtatgatgctgttctagacacaataaacaagaccccaagaaatgttcctcctcgtgagcacacatttcagtgagggagacagacaagaaataagataaattagtaggctgggcacggtggctcacgcctgtaatcccagcactttgggaggccgaggcgggtggatcacgaggtcaggagatcgagaccacggtgaaaccccgtctctactaaaaaaatacgaaaaaaattagccgggcgcggtggcgggcgcctgtagtcccagctactcaggaggctgaggcaggagaatggcgtgaacccgggaggcggagcttgcagtgggctgagattgcgccactgcactccagcctgggtgacagagcaagactccgtcttaaaaaaaaaaaaaaagataaattagtaaaaatatctatgttagatagtgattattagatgtgaggcttacattaaacagtgtatacgaggcacacagcacaacacctggcatggagtacgtgctcaatagagaataatttcttctgtgtatacgaggcacacagcacaacacctggcatggagtacgtgcccaatagagaataatttcttctgtttcttgaggcttcctaacagctccggaattaccctacaacgtgstggtagtcggcaagaagcctgactggttgctttctatctcttgccagttaaggcctaaacctgtttctgcttaagaagacaaaagaattcttacagtggtgttttgtacttcctatatggcagattaatcaaggtggtgcctaaacacggttgataaatgaccttttctggagccagttggcaggagtccttgcctggggcaggatggcaggtgttaagtccacaaagacaaatgcatagtgtcattgctatttaagcaaaacagactagaagaccgaaacggctgtttctcttaaagaaaagatgtgtgccctatgtcctgggccaaatgctggagcactgagcaaagtttgcagtattagaaggaaactgcctactgcattatttatgggagaccagggcattgacagaaagccaggaaaaggagagtttaatggtttgcggttttgatatttttgtccattgtagaaaatttggaaagtttagaaatgtttaaagaagcagccagaagtccactcctagagttcgggtctgtcatcagacccatctccttgcctcagcttcctccttcaaaaacatccagccaggctgggtgcggtggctcatacctgtaatctcagcactttgggaggctgaggcgggcagatcacatgaggtaaggagttcgagaccaacctggccaacatggtaaaaccccgtctctactaaaaatacaaaaattagccgggtgtggtggtgcatgcctgtaatcccagctactcaggaggctgaggcaggagaatcacttggacctgggaggtggaggttgcagtgagctgagatcgtgccattgcactccagcccgggcgacagagtgagactctgtctcaaaaaaacaaacaaaaaaaaatcagtgaacggtcatttactgaattccttcttcgagcctgggcctgcactaggcacagagtacagcccttgtccttgggcagtgcccagctttgtgggttagggaaagggccagaggtagagaggagcaccaagaaagggttcctaccttagactgtcaatttttcccagaggacagagctaaggaacaaacttttgtaaagaattggaacaaacagttgtaatcatcaactaagggtgattgtgaaaaagagacagtggactgtaaagaagcaaaacacagaatgatggtaactgtagctcttcttatgtaagagagcctggagctctgtacacaaggatttagtgtgtaatattacctctcagaagaaactggacttgaggctgtgggccagtacccctgtaccttgcattaagaacctaataagtgaaaattcagaattacaacccaaactcgatgagggaattggcccagggaggttgagtgattttcttgaatcgcacatttagttggtggcagagccaggataataatgaaggaccttgaacttcgctcagtccgtgagtttttttctattactccatcggtaattatttcctttactaaaatgtacattcttatgatatctttaaaatcatgctcacccttgtatttaacaaatgatttactaacagttgatttacatacaatttttaaggaacatatttatagcatagaaagtggtgcagagggttttaccaaatttctctggggtgtccaggtcccctggtccttccagaggtgcgtattcataagtaaatgttggcattctgtcatccattttttccagatgttcttcccaagtagtgtgttatgttttgtgtttttaatatttctcatacacgtttttaaaaatctgggcacataaatcctaataaaactctcaactatctcctctgtgctgtctcaaatttctgagtatgcttatattcatgacacagtgtctgaagtcatgaatgctatcacataataaggacttatatccctaaaccccagtcttatgtttctagatgttctgaaaattcttcacacttcacttataaatgccgctatactgtaccatgacatttccatggtaacatatatttcaaacatgaaaacaagaagcccaaggaaaagggaagttggtttccaatgcataaattaaaaaattaaaaattgtagaatacataaaatgaggtgatgggtgtagtataaggggatacaattaggggactgtatattttattctactttgacctctcctgaacagaatgttcctgtaggctcaccttagggatgggcagtatctaccacccacccagtggcccaatcttggaatcatgttttctttgaccctgacatcctggcaggtccatgtgatttccctaacatctcttactgtcacctactgcaactggacaggggtggtcacccacctctcacctcactgtctgaagaccatcccctacactgctcctgtgctatttggcttggagtttgctgaaaactggagacttttggacaccaactttttgagctagctcaatcatgccccactttgtgcctggaatccctctctgctgccatccacctgggaaactccccttttggactcaagcctcagcctcaccattgctgttctcccccaccacccaccaacccactcagtgaagcagccaccctcccctaccaccatgtaaaatgcacattctttaatttttttttttagctttagcttttgtggatacatagcaggtatatatatatttatggagtatattgaatattttaatacaggcatacaatgtatagcaatcacatcagggtaaatggggtatccatcacctcaagcattcatcctttgtgttacaaacaatccagttatactcttagttattattattattattattattatttttgagaggagtcttgctctgtcacccaggctggagtgcagtggcaccatcttggctcactgcagcctccacctcctgggttcaagcgattttcgtgcttcagcctcccgagtagctggcattacaggtgcacgccaccacacctggccaatttttgtgtttttagtagagacaaggtttcaccatgttgaccaggctggttttgaacttgtgacctcaggtgatctgcctgccttggcctcccaaagtgtgattataggcgtgagccaccacgcccagccttcctttagttatttttagatgtacaattacattattatgactacagtcaccctgctgtgctatcaaatattagatcttgtccattctttctaactattttttggtacccattaaccatccccttttccccccaccccaccctccactatccttcccagcctctggtaaccatcattctactctctgtctccataagttcatttattttaattgtagctcccacaaataagtgagaacatgagaggtttgtctttctgtgcttggcttatttcacttaacataatgaccttcagttctatccatgatgttgcaaatgacaggatctcattcttttttatgactgaatagcactccattgtgtatatctgccacattttctttatctattcatctgttgacagacacttgggttgcttccaaatcttggctattgtgaatggtgctgcaaaaaacatgggagtgcaggtatctctttgatatactgatttgctttcttttgggtatatacctaacaatgggattgctagattatatggtagctctatttttcattttttgcagaaccttcaaactgttctctgtagtggatgtactaatttacattcccatcaacagtgtatgagggttcccttttctctgcatccttgccaacatttgttattgcctgtcttttggataaaagccattttaactggggtgagatgatatcttattgtagcaatgcacattctgatgtcaagaaaactgtaacacttaactgaactttgttgtttgcaggatgtttttcttctctactagcccaggacctcctaaaagccaagcccacatctgattgttccatgttccctgcatccagaataaaccttgcgtggaactgctcaataaatgtttgatagatgaatgaaagaagggattttatggtaattttttattgtggtaaaattcatatgacagaattcaccattttaaccactttaaagtgtacatctcagttgcatttagtgcattcacaatgctgtgcaaccatcaccactatctagttcagaacatcttcatcacactaaaaggaaaccctatactcattaagcagtcattctccattctctctcatccttggccccagcaaccatgaatcaactttctatctctatggatatgtttggactcatgtatgtttgttttatattttgtgtaataatcccatactgtgttacttattttgttgctcaagttgttccagctttggccattgggtgttttttcaggttggcttctgtgtctctttgatgtgcttccaaccttttgttttttcttagcaggtccttaccttctggtactacaatatgctccaagattatcttgttttttgccttccacacctgtgaccagccatttctctattctcgatttctgtctagccctggttccttttattggagaatggtgtttagaaagcaagatatgggcagtgagtgtattgctactggaatttgggtctttttgatatcttccatgtctctacttaacaagctcaattttttctttaggttattgatcacatggaatacagtgataatagttttaatgaccttatctatcaattttacctatctccctcagtttcatttgactgatttttggaaatagcttttggctattacttttaagctttgttagatgagaccagagtaatattagtctagggctaattttgccccagtgttgagggcacccgaaaccttatgaaatatgtcttgccactctagatgttaggaataggaagtggacctgtgtgatctccaaaaatggttccttctaatccttttaggcagttctttctctggcctctggtagtttccttacatacatgctgaagacttgagggggctttgtatatttggaagcaatgttgccaggtggtactcagaggttctgggatatatcttcctggtgaacttttccttttatcattatcattatcatatgattctttatccctagtaattatttttggcttaaaagctgtcaatattgcattattttgcttagcatttgcctagtatattttcccatcgttttaacatttctgtgctgctattattattattattattttattattattattattttttgagacagggtctcactcctgttgcccaggctggagtacagtggcacaatctcagctcactgcaaactatgcttcccgggctcaagggatcctcccaccacagcccccgaagtagctgggactgcaggtgcctgccaccacacccagctaattttgtatttttttgtagggatagagtttcatcacattgcccaggctggtctcgaactcctggggccaagcagtcatcccaccttggcctcctaaagtgctgagattacaggcatgagccaccatgcctgggctcaaattagatgttttaacagccagtgtttatttagatttataaacctgcataccggcttcgttgcctatctttctctctttttactgaaatataattcatatccaataaaatcgttagtatatttacaaaattgtagaaccatcaccactaattttagaacagattacagcattccacaaggaaaccccctacccattagcagtttcctcattttctttaatcccctggcaaccactcatatactttctgtttctatggatttgcctattttggagatttcatataaatggaatcataatatgtagccttttatgtctggcttctttcacttagcctaatgtttttaaggttcatccacgttggagcatgggtcagtcatttattcctttttttttttttttttttttgagatggagtttcgctcttgttgcccatgctagagtgcaatggtgatctcagctcaccacaacctccacctccagggttcaagtgattctcctgccttagcctcccgagtagctgggactacaggtgcgcaccaccacgcccagctaatttttgtatttttagtagagacgggatttcaccatgttggccaggatggtctcaatctcttgacctcatgatctgcccaccttggcctcccaaagtgctgggattacaggcatgagccaccacactcagccccttcattccttcttatggctgaataacattccattgtgtgaatctaccacattctatttatttatcagttgatggacatttaggttgttttcggcttttggctattatgcagaatactgctatgaatgctcatgtacaaggtttttgtgaacatacgtttttaattcccttaggtatacacctaggagcggtattcataagtaattcattatttcttgtattcactggtatgctggtaaatatttaacaccagttttcacttggtagggttggggatctctgatttgtaacatttgttaatttctagagtgtaaatattcaaattaccaatgtggcatcattgaatgtagaactgggaacagatgcagagtagtacaccattctatagtatgtctactgtataaacacaggagatacaaataaaagttgcatggttgatagcataatgtagtaaaataattaagaaggcatgcattgtgaggatttttgacctttatatttaaagtgattcatttaattgtaagtttacataatttaatgtttgaaaatgggccggttgcagtggcttatgcctgtaattccagcactttgggaggctgaggcgggtggatcatctgaggtcaggagttttgagaccagcctggccaacatggtgaaaccccatctctacaaaagtatgaaaagtagcctggtgtggtggcctgtgcctgtagtctcagctactcgggaggctgaggtacgagaatcccttgaacccaggaggcagaggttgtagtgagccaagatggcaccactgcactctagcctgggtaatagactgagactgtgtctcaaaaaaaaaaaaaaaagaaagaaaagaaaatgactgtgtgtaacaaccaattctcaaaattcctggaagttttagcagtctgctatctgggctgatcagagctagctttggtgcctcacttgtatcccacaccttacatgttacttctttctggattcgattttcttttttctttctttttcttcttttgagacagtctcactttgtagcccaagctgccaagctagagtgcagtggctcaatcttagctcactgcaacctctgcctccagggcttaagtgattctcatgcctcagcctcctgagtatctgggactacaggtgcatgccaccacgcccagctaattttttgtatttttagtagagacggggttttaccatgttgcccagggtgatctcgaactcctgagctcaggtgatccgcctgccatggcctcccaaagtgctgggattacaggtgtgagccactgtgcctggcctcaattttctttaaaaaacaattgtttttttatggagttggtcttgctatgttggccaggttggtcttcaacacctggcctcaagcgatcctcccacctcagcctcctgaagtgctaggattataggtgtgagccaccatgcccagcctgaattcaattttcttatagacgtatatctattaatgtgttaaaatactttcagcaggtttctgtgaggtaaactaactgtctttgttcatcagaaaatgtctgaaagtttggctctcgcttactaatttgtgtataggattctggtttgagatttattttttgtgcacactttgaagatattatcctactgtctcctggttctcattgttgctgatgagaaagctgatttcattgtagttaacattccttttgataatctgtcccttgtcactgcagacttttatatttgccttgtggttttgcagtttaatcagtatgtgactagtcatgtaattgtattgtattgtattgtattttattttatttcattttattttattttattttatttacttgagacacggtctcactctgtcgcccaggctgtagtgcagtggcatgatctcagctcactgcaacctctacctcccaggttcaagcgattcttctgcctcagcctcccgagtaactgggattacaggcgtgcatcacccaatgcctggctaatttttgtatttttagtagagatggggtttcaccatattggccaggctgatctccaactcctgacctcaaatgatccacccacctcggcctcccaaagtgctgggattacaggcgtgagccaccatgcctgaactgtttatttgctgtcttcgtatgtttctccagttttggaaaattatcaataattcatgatggttaattttatttgtcaatttgtctggacca

SEQ ID NO: 94656 - DNA, 13384 bp, Homo sapiens
ccccgggcccgcccggtccccagctcccctcgctccgcgcgaccgcagctgctcccgccgttcccagccagccccggcgcggggccgagattacctcgggctgcggcagctgctctgaggaggggccgggctggcagcgagcagacccctgccggacactcagcaaacggcagcctcaccccgcagggccgcgccactccccttccccaccccaccgccgcgtcccggctcagcgctccccggggaacgcagggggaccgggctcgctgcgtgaccttgggtaagtccctgccccgttcggcccgactttccgcatgcgtgcatcctatgggatggggttgggcaattgtgggagcccatctttctctaacgttctggggtttcttgaacctggaaacttagagaggtggacatccctgttctctcccccaggctctcagcccacccacctggaagcgcccatgtgtcaccttacccaggagagggcggcagaggctgcgagcaggacggcagccccctctccccacccccaggaccctgagatcctgcttcacgggctgcaagaagttggggggccaggattcggcgcggaggccgggggtgtgggtggggagactgcagagactcccgagacccccccaagtcagggcttttcgctggtctcgcagccccagcccagcagctgctgcagtcttgcatgttgtggatgcaagcattttgctgaggaaactgcatagcgttcccaggactctagggcccacgacccctcaaaagttaagagccgctgatctaatctaaccccactttcaccctcagttaacaaaagaggaaaactgaggcctgagagggtgtgacttgcctgaaatacctaacctggtgagtgatgggtggaaccagctcctaggctttctgcgcaggtgtccagggacagagaagggtggtttaaactagagaggtggcaggcagaagtagatggatttgataactatttaggatacaccatcaaaatttaactcaaactggattacacacctaaatataaatggccaaaccataaaacttttttttttaaaaatggagacaatcttaacaatattgggtttgaaaagatttcttttttcttttctaaaggcagggtcttgctttcattgaccaggcaggagtgcagtgccctgatcacagctcactgtaactttaaactcctgggctcaagagatcctctcacctcagcctcctgagtagctgagactacaggcacgtgccacgacacacagctaatttttaaattttttgtagaaatggggtcctgctgtgttactcaggctggtcatgaactcctgggctcaagcagtcctcctgcctgagcctcccaaagtgctgggattacaggtgtgagctttggcacctggccagatttcttaaatatgacacaaaaagtgtaaatgatagaagaaatcaataaattgaacttcatcaaaataaaacgcttttgtttctcaaaatgcacgaaactattaaaaatgaaaagataagccatagactaggacgaatatttgtaaaaattctatctgatgtaggacttgtataaagaacttttacaattgaataaaaatccaataaaaatggacaaaacatttgtttgttttctggtgtttgtttttgtttttgagatggagtcccgctccatcacccaggtkggaatgcagtggcgcgatcctggctcactgcaacctccacctcctgggttcaagcaattctcctgcctcagcctccccagtagctgggattacaggcgcccgccaccacaccaggctaatttttgtatttttagtagagacagggtttcaccatgttagccaagctggtctcaaactcctgacctcaagtgatctgcacgcctctgcctcccaaggtgctgggattacagggtgagccaccgcgcctgtcaaaaaatggacaaaacatttgaacagacacttcatccaaaaagatctctggatggcaaataggcacattaaaaaacactgagtgcattactcttagggaaatgcaaattaaagccactagaaggactgcttctaaaagaacacctactagaatggctaaaagttaagatcaaccataccaagtgttgttatgttgtcaaggatatagaagaactggagctgtcatacaccaagagagggtaaaatgatcaccaccactttggaagacagtttggcaatttctttaaaatttagcgatacaaagaaatcagccatcaagctacaaaaagacatagcataaccttaaacgcatattgctaagtaaaagaggctggtattaaaaagctgcatactgtatgattccaataactctatatgacgttctagaaaaggcaaaactagcaatggtaaaaagatcagcagttgccagggattcagaggggtaggagagggatggagcacagggcatttttagcacagcgaaactattctgtatgatactgtaatgacggatgcatgacatgcatttatccaaacctgcagaatgtacaacactaagagtgaaccttaatgtaaactatggacttgaattaataatattgtgtcaatattggttcatcagtgattacaaatataccacaggctgagcgcagtggctcacccctgtaatcccagcactttaggaggctgaggtgggcggatcacataaggtcaggagttcgagagacgagcctggccaatatggcgaaaccctgtctctactaaaaaatacaaaaattagctggacgtggtggtgggctcctgtagtccccactactagggaggctgaggtaggagaatcacttgaacccaggagatggaggttgcagtgagccaagatcacaccattgcactccagcctgggcgacaagagcaaaactccgtctcaaaaaaaaaaaaaaaaatagaacttagtcactggttagatatggctcttggacaccaggagagaccaaagacaacttcagaccctggatctggcttgagcacctgagtagattaaagagaagggggaatgcactaagctggagggacagtatgggatcagggtatggggtatctttgggatccccctatccaagaggagattcctaggggtgaggaacagaccttgtgctcaaaatagaggtacaaatttgggagtcactagccaccaaaaagcagaggcaagggggctgacaccttggtcttcatatgaagatgcttcatatagatgtcaattctccttaaattaatctctaagtgtatcacaatgaaaaattttaagagtcttctggtgggagataaggagggactagaaaagctgatttaaaggtcatatggcaaattaaacaagtaggaaacttctgaaaataaaagacataatgagtatagactaatcctaccagatattaaaacacaacaaatctatcattaaaaggtaataattaaagagggttactgacacatagagatcaatagaagacagagaaatttagaaacagattcaaatacaggcaggaatgtagtagatgataaaagtaccatttctaatctgttgagaaaagatgagttaataaaagacattaggaagaaaagggagcaatctggaaaaaaagtaagttggattcataatttgtatcttagaaaaaattacagatgaactcaatttataggtttggaatatgttgttcctaatgaaaaaaacatttaaaaaggctgggtgtggtggctaacacctgtaatcctagcactttgggaggccaaggtagatggatcacctgaggtcaggagttcacgaccagcccggccaatatggtgaaacctcgtctctactaaaaatacaaaaaaaaaaaaaaaaaaagctgggcatggtgggtggcaggcgtttgtaatcccagctactcgggaggctgaggcaggagaattgtttgaacccagggggcggaggttgcagtgagccgagattgcaccacttcactccagcctgagcaaaagagtgagactccgtctcaaaaaaataaataaaaatttttttaaaaattaaaaaataaaaactctaggtctggtgtggtatctcacaccacctgtaatcccagcattttcggagcctgaggtgggaggctctcttgagcctaggggttcaaggcctcagtgagcaccgctgcactctagcctgggcaacaaagcaagactccatctctaaaaaatcaataaaaaataggccaggcgcggtggttcatgcctgtaatcccagcactttgggaggctgaggcaggtggatcacgaggtcaggagatcaagaccatcctggctaacacggtgaaaccccatctctactaaaaatacaaaacgaattagccgggcgtggtggcgggcgcctgtagtcccagccacttgggaggctgaggcaggagaatggcgtgaacccaggaggcagagcttgcagtgagccaagattgcgccactgcactccagcctcggcgacagagtgagacaacgtctcaaaaaaaataaataaataaaaataaaaattaaatgttaaccttcaatatttaaacgtacaaaaatgaaaacgaaaatacagccagaagctggctgggcacggtggctcatgcctgtaatcctagcactttgggaggctgaggtgggtggatcacttgaggtcaggtgttcaagaccagcctggccaacatcgtgaaaccctatctctactaaatatacaaaaatcagctgggcatggtggcacacaccagcaatcccagctacttgggagactgaggcacaagaattgcttgaacccgggagatggaggcggaggttgcggtgagtggagatcgcaccattgcactccagcctgggcaacaagagcaaaactccatctcaaaaaaaaaaaaaaaaaaaatacagccaggagctaaaggagaaactttttgtatcatctcagtgtggaaacagtctttttaactatgacacaaaacccaaaagtcataaaattgcattttttactacattaaaaatccatacagttatgtcaaaatgatggactgaagaaaacatttacaattaacatcttaaaggagtatttttctccatatacatatataaaaaatcatgttctgggtgtggtcgctcattcctataatcctaacactttgggaggcctagacaggaggattgattgaggctaggagtttgagactagcctgggcaacataatgagaccccatctataaaaaaattagaaaattagccaggtgtggtggtgcatgcctgtcatcccagctactccagaggctgagatgggagggtggcttgagcccagcagttggaggctgcagtgagctatgattgtgccacttccctccagcctgggcaatagagcaagatgctgtctctaagaataaaataaaagtaaatcccagcactttgggaggccaaagtgggtggatcgcttaagcccaggagttcgagatcagcctggacaatacggtgagaccctgtctgtaccaaaaatacaaaaagttagctgggcatggtggcctgtagtcccagctatcccagaggtcgaggctgcagtgagctgtgatcgcaccactgtattccagcctggatgacaaagcaagaccctgtctcaaaaaaaaaaagttcacaaataaaagaagacaaataggtcttaaacatatgacaagatgttgagctcactgaaaagcaaatgtgaattaaaatttcaccaagagactgtttcccacttagcagtttggcaaagataaaaatctggcacctcacggctgggtgcggtggctcacgcctgtaatcccagcactttgggaggccgaggcaggcagatcacgaggtcaggaggtcaagatcagcctgaccaacatgatgaaaccccgttgctactaaaaatacaaaaaaaaaattagccgggcgtggtgacgcacatctgtaatcccagctactcaggaggctgaggcaggagaatcgcttgaaccagggaggcggaggttgctgcaaagcatggtgaggcccaggtgaagatctggaggcactcctatgatgtcccaccacctccaatggagcccaaccatcctttctatagcaacatcagtaaggatcgcaggtatgcagacctcacagaagatctgctaccctcctgtgagagtctgaaggacactattgccagagctctgaccttctggaatgaagaaatagttccccagatcaaggaggggaaacgtgtactgattgcagcccatggcaacagcctccggggcattgccaagcatctggagggtctctctgaagaggctatcatggagctgaacctgccgactggtattcccattgtctatgaatgggacaagaacttgaagcctatcaagcccatgcagtttctgggggatgaagagatggtacgcaaagccatggaagctgtggctgcccagggcaaggccaagaagtgaaggccagcagggaggatactgtycccaggagcaccctccctgcctgtcttgtccctctgcccctcccacctgcacatgtcacactgaccmcatctgtagacatcttgagttgtagctgcagatggggaccagtgactcccattttcattttagccattttgtctcctgcacccactcccttcatacaatctagtcagaatagcacttctagagcacaggttctcagtccaagctgtggaaaagctccccttatccaacagagtttaaaagtagtgacttgggtttttgcgagttgctttgtttactaaggacttgtggggaggaaccatgctaagccatgaccaatgaggagaagcaacagagcctgtctgtccccaggagccagtcctctgctcgtctgcagtcaggccactgcctgagggctctagtcattccagtggaagatgaatgtaacctgcatggtgatgtgacaactgtttcctccctgacgccagaggagctggctctagaaggttgggatcaatcctgaatttagttatgtgttacatttaatttaagaagtatagtatatataaataatacaaaacaataacccttctggggtttctcgtggcrgttgaaatagtcccacatgtrgtcatcagaaaataagccattcctcataccaatataggatcagctccttgacctctgaggggcaggagtgcttcctggtgtgggtattacaatcccttcctgccttgtttcgtgacagtgaaatgcctcttggtcctgtccaagtatgtctttcactgatttctgaatcatgttctacttgcttggccctgccacatgggtccagtgttcatctgagcataactgtactaaatctttttccagatcagtataataaaggagtgatgtgaaaaaaaaaaaaagaaagaaaaaaagaaattaacccttttgagtcctcatgtctcttgggggaggggggttgtttattataattacaatattatatttgactgtagctcaaggaagggatcaagtcttattcctaagtaaacctggccctgaaggcatttctagactaaataaagagctgtcttccattcaagttttgtttcccaatatgttcctggccttttttttttttttttttgagacagagtctcactctgtcgtccaggctggagtgcagtggcatgatctcaactcgctgtaacctccgcctccacagttcaagcaattctcccaccttggcgtcccgagtagctgggattataggcacctgccaccatgcctggctagtttctgtatttttagtagcaaaggggtttcaccatgttggccaggctgtttttgaactcctgacctcaagtgatccacccggctcagcctcccaaagtgctgggattacaggtgtgagccaccacgttcggctccctggccctcttctaagggctgcagatacctcatctcatttaatcccatctagactgtgtagatctcatcatccataggcatggatagcacagagatgaaactgaggctcagaataactggccaccaatgggaaggggccaagctgttacagagcctgtgctcacatgttgtaaccctggtagataccccctccccaccccaaccttgggtcaaggaaccaggccaggacctaagcacagttggtgtcctgtggacatgaatttattagaggggactggcaccagagtgggcacaagctgcaggctgggaggaaggggcaggggtgggagcacagccaatggtgtgtcagtcagtgggccagcaggcgtgctgttcttcaccctgcagagcttcagtgcccagggcgtgccggaggctttgggaagactggggagaggaaagagtgaggctcagagaagaaacctgccaagctcacacgggaggggcagcacgtcgaccccaggcccatggccctctctctcatattgttggtcctcactcctgcctcccaagctcccacaccagcccccagctcctgtcccatcctgcactcactgcggagggagtaggtgcctggttccagttgcatctggggaggcaagacgatgagaaagtccccaccccaggcgtttttgacccttgagagataattttgggagggagggcgatgacattcagaggtcagagaagggcacttggatgacacaggcttaagcaagtggctgctgcagtgctggggcaaaccacagggggaacagtggggcggcgagaggccagggccccggggaaggcgaacagggacctgtggacagaccctctgaaccccaccatggtgggggcgccggtcccgagtccaagcccagtggaatggctcctttgccatgacctgggaggagcagagtggacagtaaatggggtgggaaccccagccttccccacaccccaggttgcctcccagcctcacctcctcacagcactggcggctcacaacagcccggaaacccatccgtgcccaaagcttatccctctggtgcaggaatttccccactcgtaaacaccaatcttttcccagggcccatggaaaaatctcacatttggggccctccaggtcctcctccatgtcgtttgcaaggtacctagccacagaggcacaaggtcagggagcagaggccacacatctgccctgtcccatctgacacctccagcaaatgcctccactgcctgcccccaccactcacagggccaagaacaggctgctgtgggtatactcgctgagcttcaggtgggcgcgctggaagtagaccagcaccatggccaggagatactgcagagacagatcggggtggggggttagttattctctgaggaggaggggcttgcacccaggttcatttgcacccagggaggttttgctgcagggaaagaaagtcagtaaaatggtgggaagtggtgtgcaaagatgagggggtaaggatggaaggtgagtggctctccctaccagaccagggcactcaattcccaccaactcaacctgaccctcaagagacccccagcctgtactccctcaccttatctgaaatctggaagcaggggtctttggagaggaattcctggacaaaactgtcctctgagggtagagaagacatgacaggacgcaggttaccaccacctccatggagaagagtggcatcagaagctccaaagcccaagccaccactgaaccctctctctctttctctttttctccctttttctctttctctctctctttcttaatataaatagaaatggagtctcactatgttgaccaggctggtcttgaactcctggcctgaagtgatactcccatttcagcctcccaaaatgttgggattataggtatgactcacggtgcctggccctgaatccagtttctgagaggacacccctcccacctgcctaagctgggatacctgagagggagagggtcagaggtctcagatgtctgtacaggcaggtgagaccccacacttcacatctgctttcacacttgacctcacggcccctcccgtgccagccctccaaactcacccagaaggctgaggaaggcctggacctcctggtgctggcgaaaacggaggaacccattgcccccaccttgccggctgcagccccccagctctacctgggtggtaactacaggggaagtggtggggtcttgggagtcactcatctcataggagatggagatggggcagggtgacctgtagagaaaggaggctcaggacttagcatgtacccccgtgatgctcacaaatcaagagggtggtgacaggggccaggacggtggaggggtgggtgcagagacttgggggctcagaacagaaggcagccgggatgcaacaagagtggggaggccagaaaagaagcaaagagttgctataggtgagggtgtggcaccctcaccctcctcctggcaccccaggacaggccagagtaacagcagcaacaagcaccgctgagggcttcctaagtgcctggggctgtgcttaagggccttatcttattccatcctggtaaggaggtaagtttaactcagaccggtcgtcaaacgaggaaactgaagctgaggcctaacagccggttaaaagtgaagcccttggtctccaaaaccccaagaggttttttggtttttgtttgtttgttttgagacacagtctctctctgtcgcccagactggagtgcagtggcgcgatctcggctcactgcaacctccgcctcccgggttcaactgattctccagcctgagcctcccgagtagctgggattacaggcatgcgccatgccaccacgcccggctaattttttttgtatttttttggtagagacagggtttcaccgtgttggccaggctggtctcacactcctgacctcccaaagtgctgggattgcaggcgtgagccactgcgcctggccaaaaaaaaagaaaaaaaaaacccaagagtttaactgctcctctaggccccaactcacaaccacccccgacccctcaccaaagcagagttgaaagggccactgatcccttacaccgaggggaaactgaggccctcagggaggaatgaaattagaaaaatacctggatttagagcaagttgatggggccacttcaaacatttcaagctcccgtcctaaacccaccctcatccctgagagagagaagccaaccacggggccgaggagaacgtgcggtcgaccaccccagggccaatctgggcccctccatctaggcgcccgcaagcaacccagcctcctcctgcagcgagccttacccgagctcaggaatggcccagagcataacaccaacgccgccgcgagtgcgcttatatagcctgagggcggccctgcccaaagcagcccgtccaccaatcagggccttcctggggggcgaggcttggccttcaccgcctgcctctctgccagtgagtccagtcggcacccagctgtggctccccagggtttgaaagcctctccaaagcttcatcaactacaagaggggtgaaggcaggccagctggaccccagggcctaaggccccataggacaggcagggagctaggatccctgttcccctcttgacaaatgcagcgccaaggtgctgagccgggatatgagacccggactgcgagggcctggtgggcgagttttttttcattgattgtgccttgctagggcagggtctctggctctctatgggtgtctctgaatctcctggcctccttgagtctctaggtttcactgaggccccccgagtctctcttttgtttcttattttatttttcccctcgtaacacagaacaagctgcctgggtctcagtgggcctctgagtctctcagtttcttgttgcctctggtgtctggatgtctgtggatctctgggtcctttgttttctctctgatctctggtctctggtgtatctgctgtttcatggtctcccccaggccgcctcccaggctccctgaggccgtgaaggcctttctagaccagctggtctgcatcaggccatcctgtttgtgtgtgtgcacgcatttgaagtcggcctcccctagaaaggaagtagtgagtggggcagcatccatagcccgttcactaaacacctactgctgcctactgaggagtctgtgatggaatcagctcacgtgttcctcacagcaagcccgtgaagttgatgagaatgatgagaagcctcattttgtcagcgaacaaacaactaacacacagagtttgggttgctgaccgacaggctgagtaacttcctgccagccactcagctggtaagtagagatagagttccagcctggctgctgggcccacacgctgggtagcctggctgtgtggtctacagctgttcctggacgctgcctgcacagagaaggtgttccatgaaaccgaatgaatctcctagaccagctgtgttttcaactgttctcctcctcccccagtaattaaggttagagatcaggaaggtgtaccaaaaagaagcctgggagtgggctagtcactttaactttgggagggccttcaggctgatttccttcagtgccacccctggagatctgacaccgatctcccacactggggagaatatttgtttttactttttttttttttttttttgagacggagtctcgctgtgttgcccaggccggagtgcagtggcccaatcccggctccctgcaacttccacctccagggctcaagcaattctcctgcctcagcctcccgagtagctgggactacaggcatgtgccgccatgcctggcaatttttttgttttgttttgttctcctgacctcatgatccacccgccttggcctcccagaatgctgggattacaggcatgagccaccatgcccagcctttctctttcacttttcagaatcccatgattcactgggctcttcaatctgcccagataatctccccatctcaagatccttaacttggctgggagaggtggcttacccctgtaatcccagcattgtgggaggcagaggagagcagatcacctgaggtcaggagttcaagaccagcctggtaaacatggcaaaacccctcctctactaaaaatacaaaaattagcggggcatggtggtgcatgcctgtaatcctaactactcgggaggctgaggcaggagaattgcttgagccctgggggtggaggttgcagtgagctgagatcatgccattgcactccagtctgggcaacagagcaagacttggtctcaaaaaaagatccttaaccatctgcaaagtcttttttgccatgtgagataacatattctcaggtctgggaagtgaaatgtagccatctttgggagtccattattctgcctgctacaattatcacagcaaaatttattctatgctaactaatatactatttataaaatttatattcatgtaaatgta

SEQ ID NO: 94657 - DNA, 42870 bp, Homo sapiens
gggcaaccagcagcccccaaggctgttctgtgtatggagtagccattattttattcctttactttcttaataaacttgttttttaaaaatacatacataaaattaaataaacttgcttttgctattttgctttgcactgtggacttgccctgaattctttctttctttttttttgagacagagtctcactctgtcacccaggcttgagtgcaatagcacaatctcggctcactgcaacctccacctcctggattcaaacgattctcctccctcagcctcccgagtagctgggattacaggcgcctgccactatgcctggctaatttttgtatttttagtagagacaggaattcaccatgttggtcaagcgggtctcgaactcccgacctcaggtgatccacccgcctcggcctcccaaagcgacgggattacaggcgtgagccaccgcacccagcttgccctgaattatttcttgtgcgagatccaagattcctctcttggggtctggatcagggcccctctcctataacagcttgaattatgatctgacagttctgtggaccagaagtctgacacagatatcattaagctaagatcaagctatcagctagatgtattctcttccagaggctttaaaggagaacctgcttgtcttttccatattctagggggcacctgttttcctcagtttgtggccgcttcctccatcttcaaagctagcaatgtcagtctaattctttctcacgctcccatctctccagctctctattccctcttccacttttcaggaggcttgtgattaccttggatccacctagattatccaagataaccaccctattttaagctcaaatgatgagcaaatttttctttaattattttaagagacagggtctctgtcacccaggctggagtgcagtggtacaatcatacctcactgtgtccttgaactcctaggctccaataatctgccagcctcagcctcccgagtagctgagactagaggcatgaactacaacacttggctctgatcagtacattcaattcctgcaactgaaattcctctttgccttgtaacatgacatagtcacaggctctggggcttgggacatagacctactggagttcgtcattcatctgcctgccctagggggtccgtaccatttctcagagcagcctcaacagggcagagtcccaggtgcccacggttggtaggccactctaacattccttccggctttctcctttctgtttcctcctgtctgcttcatgacttatgtttcctaggatcacctcccaaattaactaactcccttctccctaatccttgtctccaggtctactttgggggagcccaaactaagacagtgaccttggataaattacttaattagtcggaaccctggttcccatccccatgaaaggaaaacctaccgcaggggactgtggggagaattctaaaagcagtgctttaaaacactgtgcagtggggtatgtagtgaatcctcaacaaaggttagctattgttggaggggtggaagtcagggtacaggcagggaccagcctgggaccggcagagggcagtcctgtctctgagacactgaccctggaggtcagaggagtctagtggggccagggaagggtgggggaattacagggtttcccctgaggacatgaattcttttctgtaaggtgcatctgctcttgaaggcagcaaagtgtgaaccagcccttggggagaataatgaacatcaggaataacatactcaatgatttctgaggtgtcagaaaagcccggctggcactgggggctgacatgcccatcatggcaggatctctaagttctgagtttcctccagcccagtggaaggacaaagaaggcaggtagaggggcttaagtttggacatgtgggggtgaacatggtcaatgaaatgggttgaggtgagatgaggctgcagaactaccctcagacggtccaagctgaacagaatgaaacggatccacttcaggagactggtggcccccatgaagttagagtgtgggtgtcctatgtaaagaagggagaggactcagggacgggggagagggtgttggtgtttaagatttccagggttagctaagcatggtagtagtcccagctactcaggaggctgaggtgggaggattgcttgagcccagaagtttgagaccaccttgggcaacataacgagagctcatctctaaacgaataaaaaatgaaagatttccagggccgagaaggttcacagcacggccaagacaatgggtgtctaaagtggagttaaggtcaaggtcatcagatttgcacatccatcatctagcaggtgctattcctgagaatggaccctctccatcccctgggatgacagagcaggggccacttttgaatgggcatgattcaaaccatgcaggggagtgacacttctggcagcagatggtggcagtgttggatggcatgagccccgaatgagaagggcaggtgacaggaaggtgatgtcactggagctgcttttctgttttggggtgagcaggatgtggggtatagaacaggcagcctctcgtccctctgggtttcagaggaagtggaattcttaggtcagtgttcttcaaaagcatcagaatcacccagggagcctggcaaaatggggattcttcacatcccttccccaccacatacacctccgacctgctggagtcttttcccatggctgccataacaaaggaccgcaagctgggtagtttaaatcccggaggctgctagcgggaagccaaggtgtcggcagggctacgctccctctgaaagctctagggaagaattcctccttgcctctcccagcttctgatgctgacggcaacctccgctgtagcttgtagctgcattgctccaacctctgtctcggtcttcacatgcatggccatcttccctgtgtctcctctgtgccgctgtctccaaatcttccttttcttttctttctttctttttcttttttcttttttttgagacatcttgctctgtcacccaggctggagtgcagtggcatgatcccagctcactgcaacctctgcctcctgggttcaagcgattcttctgcctcagcttcccgagaagctgggattacaggcatatgccaccacgcccagctaatttttgtacgtttagtagagatggggttcgccatgttggccaggctggtctcaaactcctggcctcaagtgatctgcccaccttggcctcccaaagtgctgagattacaggcatgagccaccacgcccagcccaaatattcctttttttctaagaatatgagccataggatttagggcatatcacaattgagtatgacttcatcttaccttgattaaatctgcaaatattttatttccaagtaaggccacattcacaggtatggggggcagtgaggatttcaacacaccttttgtggtggacataattcaacccattgtatctgctagctgtaatctttcaagtgagtgaagctggtaaattagttctttttgttttgttctgttttgtttgagacagggtcttgctatgttactcaggctagagtgtagtggcacgattacagctcaatgtagccttgaactactgggctcaaatgatttacctcagcctctgaggtagttaggactataggcatgcgccatcacacctgactacttcttaaattttctgtagagacgcggtttcattatgttgcccaggctggtctcaacctcctggcctcaagtgatcctcctgtcttggcctcccaaagccctggggttacaggcaccctgagctaccctgctcagcggtaaactggtatttttaataagccccaaccagacaatgcaacccaggagaaccatctcttggacggaaccagcagagcctgagaatccagcggggatggctccctagaatggggttctggtgagcccgggagttgcgggggagcgtaggactagctcaaagcagtacccaaggaagaagctctcatcaccggcaaagaaaaggatgcatgactctgccagatgatctgggccaaggctgtagtgtggccctggatgaagtaaggcatctgtggcttacggcctctgcggcagagaactgcttcccggtgagctcgtggtgggtggaggcggggaggaagagtcggttctgaggatggtggcctcccaccgacgcagcggggatcggcctctgtcccgcccagccacttgatttccaagttctgcagagctctgtccaaggtctctttcacttttttcctgagctctcccttcggggttaatctcacctcttacggaggcttcgaacaccatttacatgctgatggcacccagatttgcatctctgagccccatccccacaccaaattccggacctgtttccctattaactttggtctggaatatccggcagacctgagatttgcaactctgagccccacccccacaccatccggcagacctcagatttaacatttccaaagctgaactcaccccgaaacttgtttgcctttcagcagttcttagataaattattagcatcgctcctcattccctcccccaccccccacccccgcaaactggaaacctgggggtcatcttatccttcttcctctccttcctacgtgctaaatcacaccaaatcccttccctgggctgcattccccttgctttcagttcaagtacatctccgggcttgactagtacaataccctcttaatgagaaccgtgaccctgtcttcccctctgggagaagccatcctccagtggcaggcgcctgtaatcccagctactggggaggctgaggcaggagaatcacctgaacccaggaggcggaggttgcagtgagccgagatcgcgccactgcactccagcctggcgacagagtgggactccgtctcaaaataaataaataaataaatataaaataaaagaatgcagactaacacgttctttgcaaacttactacagggtatgaagaaagtacacaaagacaggagcagcctgtcttcgaggtggcatcacttctgcatccagcccaggattaaaacccggagcaactggcaagcggaaatgttaacgaaaagggcatctgcgtagcgtgccaacctgccgtgccacgtaaagcacggtccagtgacccaaaacatttctgctcccaaataacatttggaaaatgctgacctactgcctagaaaagttcgatcggcattcctgcacactgctgttttagagagaagccctaaacgatatctgaaagtatttgctttattttcatcagcaatgctttagaatctcgaaagcccagaaaaaagttatttcacgacgtgaagctcccccctcgatgtcaattcgaacacatccagggttgcggctgccatgttcgctcgaacatgtgcaggacaaacaatgcaaccagcgggggaaccgtaaacctttttcctcgacttcctaccacgcacatgaagtgttcaagaaactttgcaggacgtctccacatttcacgaggctcccgtgaactccggagccgagctaaacaataggaaggacagatgctgggagtccccaagcatctaacgcgccgtttgtgttttcaaaaaacctctgcctggcgcccaggcggcttttcctgggctcctagcctcctgtgcaaattgttcccatggtcattgtcttccaggacgctccgctgcgcactcggggagcggggacagcgccccgcagagcgccgcgcggtcgagcccggccaggtggcggaaacgttcccggcccttgcagcggggcccgggaaaaaggtggcccgggcgccaagggcggctgccaatgcaactcgcaacttttgaaatcaatccttttttgcatcatgcaacggatgccaccgctcctcgggtttgcaaccccccacccctcccccgagaccaatcattgccgcgctcggggctgcacggcgcccccgcccccttcccgggccgcacgccgccacccagcagccagggccgcctcttaaagggaggtggccggccttaaaggacccccgcgcgcccagccggcgggagcgcggcggcccggctcccgcagggccgcgccgaggcaggcgagcccccgcggcgcccaggcgcgggcccgggcccccgccgccgccgccgccgccgggcgcggcatttttattcaggcgacgcttaagggagcccggccgcgcccggtgcattgtgggagcggcccgcggccgttttcgggaggaggcggagggcgcaaagcgagccggtaagcggcgggcccggcgcgggggggaggcgcaggcttaaaggggaatctgggtccgcaggcccgcggcggccgttgcaaatccccctccgggccgcccgggaccgccggggagccgcgcgccgccggccccgccagccctgcctggagaggggcagcgccgggcttggtggggccgctttaaaaaagaagcgccgcccgcgccgccgccgccgccgcgcggggccggggaaggagggagggagggcggggaggagcggaggggagggcggcggcggccacgcaggggttaattttttcgcccgccgacatttttgcgcggcggcggcggcggcccgtgcgcgcggcgggagcggccggcctggggtcgcggggtgcctccggggcctccccgcctccccttttctccgcgcgggccctgtcgacccggggcgggtgcgtcccggcgtcctccccggctcctgggccgcacgcgcggtgcccgccggctcccgccgcctcccgccggcccgaacagggatggcccggccggggccccgagctgccgcctccgccccgccgccggcccgcagcccgggcctgctgggccttccgaggcggcggcgagggcctgagcctgagcctgagcccgaaggtgtccccgggttccttgctcccctccccggccgcctccgacgcgggcgtcctggagagcgcgccccattgtgcggggccggcggggaggtaggtccggggttggcggggcagcgcgccgggcccaccccgctgaccggctccccggctccccacgctcgttggaagaaaaaaaaaaaccaaaccatggaaatgtgcccgggaaggaaagggctaaacgttgctttaaatattcatgccattgttttaaaggcgtaaacatgtggctgcggggtcgccgggcaccgtcccttattaatgcaaatggatccccctggttccctaatcactgcacatttcccccagaaccccctcccccttcccatgccctccaaaaatgtaagaatctagtacttttttcattaggatgtgaggctgatttgtgtccttagtaccatttggaattttaaatctgagcgccttcctgatacaaggtgttttaaacttttttccacccttaaaactcttgagaagatagtaatttaaaaggaagtgatagccacacaattcccctccccacctttttgggagccaggagaggaatagataggaggtaggaaaataactggatgcctcgtgagttggattttttctttttcttttttttttcctggtaggggtgaggctgtgttaaatgcgaggtgttttttgaggaaaggactttgttgtttttgttgaaaacgscttccaagtcaaagtggtattcaaactttcccataactctaagatggcttcaaaattctsgtctcytgtcacttgcggccagcgcctgctctttttgggcagggagacttcttggaatcgtgttcgaaggctgactcctgctcagttgttacgtttcccaccgaaatcattgctcatcccaaaccgtgtttttgtgaagacggtttggattactgcmcaaactcgggcttcrtgagatttatatgagcgatgtgcgtcycaagggatggaaaactctataaatgggaattatgttcttaatcataaattttataggggaaaccgaccttaaaacttggggtgtttgtaattctagtcccaataaagtatcagtctggaggtttgtaaactcgaggaacacatgttgttttttcctttagccccaaaggctaaaaaacgtaggagtgcttgttccagaaacctaacggtggtacacagggccgaaatgctgctgatttagtatggcttaatttattgtttcggttctgcaatgaaatgttaatgaggagtagcatattttgtcaatgatgtgtgtactagtttgttgggctggatgttttgctttctaggaaatagcactgcgtgaaaacatcagagaactttccaggctttcgcctgaagaacacagaccttactgtgttaaactgccactgtagtttttaagttgtgccctttagagaggactcctattagttttggattgcattgtgtatttttttattttttatttgagacggagtctcactctcgcccaggctggagtgcagtggctcgatctcggctcactgcaacctccgcctcccaggttcaagcgattctcttgcctcagcctcccaagtagctgggattacaggtgcgcaccaccacgcccagctaatttttgtatttttagtagagacggggtttcgccatgttggccaggcttgtgtcctgacttcaggtgatccacccgcgttggcctcccaaagtgccgagattgtaggcatgagccaccacgcccatccttgtgttgtatattctttgggctcagagggaaaacgtgtttttctaaaatwaggatttagcatcgtgaagaattttgtccaatgcatttacattaatgcccttttctgacaagtttgtatcgggcgtttcattcttctgtgtgataaagcaaaagatatcaaaagattttgcggaaaagtcaccttagcgaggaccgccgctttctgaaccacagtgcttccaggttgacacatgaagtgcccagaggtgctgttctaatgctgagtcctagaagaacctttgggatttgctgttcaaggtggcayggtgtcatgtgaacctgcaggctggccctcttgccacagttaaaaccacagtccagatgtcagattttacatagatgtctgtgctgacgcagtcccgttatgaaaagatctattttgtcatatgcactgctgtggtgaatataagtggtcttgatgatttcagcccttgtcacattgacttttcgctgtcatgtattcacttgattcgctggcaggtcccagtgggaattcttttcatggcatctttgtgttttggtgacacccaggtggatccataaagaacccagccaacccgcagagggaggggaggggctgagctgtgaggagagcggggcccaagaaccatgtctacgcgggagtcctttaacccggaaagttacgaattggacaaaagcttccggctaaccagattcactgaactgaagggcacaggctgcaaagtgccccaagatgtcctgcaaaaattgytggaatctttacaggagaaccacttccaagaagatgagcagtttctgggagccgttatgccaaggcttggtaggtaacccagtgtttctttgatggtctgcgatccaatcagtgagtcaaaaactggatttctcgcctcccatgttgcctatttattttttattattactttttttgcttttatagatttgaggaatacacatgcagttttgttacatgaatatattacataatggtgaagactaggcttttagtgtagccatcacccaaatagtgtacatcgtaccccctttatttttttttaatttttgtgggaaggattagaagagcaatcaatgttatgattgctatgttatgttcttgtaacttatgtagagaaagtacttgaaacgcatcaagaggggtactcttgacagtttttaaatcatggagtatgcaattgagattgttattacagtaaaaactttttaatttttattttcaatttaattgaattgaattttctgttagctgaagattaagcagaaatactttattcccttttcctaaaaggactcctaaaatgctcacattcccttcattgccctaggaaaggyggttccagccttagggttcttgtgctgtacttggatggcagtgactgtgtcaggagggcattggggttctctgcagggtgcatcgggcgaaaagcgtgttacggtgaggaggtgggactgctccagacccaggactggatggatctgttcttgaccccaggatgtcatctggaaccagggcaatgtctttttctttactacattcctgatgtcatgagtgatttcacttttcccaaacacagagcttagaaacaaattctgggctcctgggatattgtttattcatgtttcttgtgcagtttattaagtacacagtacaagactgtgatcacttttcttgtgttcgacgcatagtttcggaggtttggatgttcgataattactgtgtgacttgatcagttttcttcctttttttttgaaatggattctcactctgtcacccaggctggagtgcagtggcgtgatcttggctcactgcaacctctgcctcctgggttcatgcgattcttctgcctcagcctcttgagtagctgggattataggcccctgccacatgcccggctaatttttgtatttttagtagagatgggagttttaccatgttggccaggctgttctcgaactcctgacctcaggtgatctgcctgcctcagcctcccaaagtgctgggattacaggtgtaagccaccacacccagccaaggttttcatttcatttgtttttgcccattatttggtaaggttcattggttatgagcctggggtctcctttactcccagatagagaaagcagataaaagcagacttgcttttgttggaaaggaagaaatgttacaccccagtcgctggtgacctgcaggactttgaggagctcagtttgaaaacagttcctgccgtccagctgatggccaagctgtggagaaataccatgtgagcgagctgggtttgatgttggcttatttgtcgagaaatgagaatatactgaggaagctgttagataactgtcaagaaaaaaagctattaatacttaatgctcaaaaaccaatgaaattaaaacattacggcataaagtaagaattactatttataacttcctctggcacagttacttactagtcactcatattatgtcatgaatgtcacccagccctcctgagcctcagcttcctaatctataaaataataattactgtttggggttgggtgcggtggctcacacctgtaatcccagcactttgggaggtcaagatgggcagatcactcaaggtcaggagttcaagaccagcctgggcaaaatggtgaaacccatctctactaaaaatacaaaagttacctgggcttgctggtgtacacctgtagtttcagctactcgggaggctgaggtgggaggatcccttgagcccgggaggcagaggctacagtgagctgaggtcacaccactgtactgcggcctgggagacagagtgagaccctgcctcaaaaaaaaaaaaaagattactgttttgcattgttgtaccaaaaatgtgtgtaggtgtgccatgtatgtctgtacttacatatataatacatgtatgtgtataccctctgtacacaagtatatatggtatatatgtatgggtgtttttgaccttttttttgttgttgttgagatgaagtctcactgtgtcgcccaggctggagtgcagtggcacaatctcagctcactgcaacctccgcttcccaggttcaagcagtgatctcctgcctctgcctcccaagtagctgggactacaggcgcatgccaccacacccagctaaatttttttgtgtttttagtagagacggggtttcamggtgttggccaggctggtctcaagctcctsagctcaggttatccacccacctcagcctcccaaagtgctgggattacaggcgtgagccaccgcacccggctgtatgtttatttttttaactttttttttttttgagacggagtctcgctctgtcgcccaggctggagtgcagtggcgcgatctccgctcattgcaagctccgcctcccaggttcacgccatcctcctgcctcagcctcccgagtagctgggactacaggcgcccgccaccatgcctggctaattttttgtatttttagtagagacggggtttcacagtggtctcgatctcctgacctcrtgatcygcctgcctcggcctcccaaagtgctgggattacaggcgtgagacaccgcgccccgccatcttttttttttttttttccttgagatagagtctcactccrtcacccaggcttgagtacagtggtgcaatytcagctcactgcaacctctgcctcccgggttcaaggccctcccaggcctgattctcatgcctcagcctccctccaagtagctggaatgacagacgtgcaccaccacacccagctaatttttttgtatttttaatagagttagggtttcactatgttggtcaggctggtctggaactcctgactctaagtgatctgcccacctcggcctcccaaagtgctgggattaaaggcatgagcccccgcgcccggcctgtttatgtttttaacttttttctaattgaatgtcatgttttctggcttcaaaaatggtgttaattgaagggttaaccaaaacagcttttaaatgtacacacgattactaaatgtatcctaattaaagaaatggtaaaagaagtgtgccttagaaccagagacatttgttgcctggtgcytaggagctatcaagtaatgattgctgctgctggcgggggcggtgcrggggttgggggtgggtagtggtgtgataacttaggttgtctttctgatggaggatgtcagtattgctgaaaaccttccagcaagtttgcccattgcctcctggtcattaaacctaaactgttctgtctagtatttaaggcttccccgaccctgtggcattttcctctgttcccagttaccatccctctggaccgtccctctgtctttccatttcaaacgctagtttttcaaggcctatgggcatctcaggctcaccccttctctcttccttccttgaaatgtgattggtgatttctaaaccaatcactgtagaccagtgctgtccaaaaatacaatgcaagccacatgcgtaattttcaaattcaaagtaatatttttaaaaacccgataacaaaaatcaggtggaattaattataatctattttatttaacacaatatataaaaatgtcttttcagtatgtatatatacgacattattaatgagatgttggtttttggtactaggtgtttaaaatcagttgtctgttttgtacttacagcacctgtttgtcagatgcgcagccaccccctgtgtctagtgtcaaccacattggacagcaccagaccctattctagtagactgtggtggcacaggtgtgaaagagaaaccgtggataacggagctgcttttcagccctaggggcgtgctcaagartcccccgttactctgatcaaaggacttgctaagtttagaaataaagcgctttacaaatcaaatgtatgtaattcaaatttaagattattcaaattaagaacatttaaagctaacattcagcaacaattttagtttctctttcagtagtcctccagtttaaatggaagcctgaaagaaaactgcctcttactgttttccaaagtgaataataatatactcagaataaccagttgtcagaattatccatttagggagaatccattgagttaaagagtggtatttctatttaggtgctaaagagtgtgatgaaacaaatttctgagaggttgtgcccatgggctgtttacrtgaattatctcacacgttctcctctgacagatgaaaactgatccagtgcctgacattgttgaaacttgccattctgaacttcacttctccattccctaagcgaggtcttccagcaagagtttctgctttgttatctagtgtgataaaaatcagcctgtcttcacagactatggctttttattgagtgagatttcatttttgcagcaggaaagatctggtgcctccatgaccygcctctgtgaggtctgctgctgtcatgagaccgagtgaggcagtgcttcacggccctttcacttacgcagaatattaaaggtcgttttagtgcgattcagatatgatttaaacttgtttgaaattctgaatttatagggtagattcaggcacataatttgcttccttttgtcctaattctggctttttccctgcttttggctattgggctgcaaagtagaagtacrgcatccccctctgtatctgcagaatcctcgtgggggattcaaccaaccacagactgaaaatatgcagggaaagaagtggatggttgcatctcaacatgcacagactttttttkgtcttgtcattattccctaaacagtacagcataacaaatatttacatcgcattcacatcgtattgggtgtcataggtgatctagagatgatttaaggtatgtgagaagatgtgtgtaggttatatgcaaatattgggacatttcaaatcagggatttgagcatctgtggatgttggtgtctgtgggagtcctggaaccagtcccccacagataccaaggaacagctgtcctcataagaggacagaagagtgtccttctgaggggtgtagggctgctcactgtgttcagctttcttggtgggaatgctagtctgagtttgtaaaatgcctgcattacaagtaatttttaaaggagtacagccttatctccaagacaaggagtagcgtatcttgactactactggtggtcttgggactcctctgacatagatgccagagtgtttatatccaggcttgattggaaatttccattgaattgtagattgggatttgtcctttcatttcatctgtgtgtgtgtcattttcacttttgactaaaatgtataagtaataatagcatttttcaatgtaaaaatattttacatggtttctgatgggacaatacgataatgtctgtaaagatgtacgcacaataactatacttaagataacccaagttccatttataggattctcrtcttcaaagaaattgtatacggtaccagtcacacgctacagtaatacagtaaaataataaaagtcatacagtgaaaaagatttttattcaaggcatcattaaggattaaaactatgccatattggagttgagtcttgatgagtaacattttcattggtattttccatcctaagctggatatgtttcacgtttatttcagttacgcttcttgataggaaacacatggcttcattggcagcctgcagtttccataagtatcttatgagctcttcctgttcagagcactggtgatataaaatgaaatggctttcccgttttatttttggatgctaatgacttccatctccacaggcattggaatggatacttgtgtcattcctttgaggcacggtgggctttccttggttcaaaccacagattacatttacccgatcgtagacgacccttacatgatggtaagcgtgagccgatgtgtttttgtgactggaagggcttatttgtttggtttgggttgtggctggggttttgtatgtatctgtsgggttttggttttatttctgttatatcccgactatactgccccaccctgcccagactcctgcagttgctgaagtcaggcctgtcccctgcccacacttggcactgggcataaagcaattagggaggaagcagggaaggccctctgctgctgttgcaactgagtacatgctgtgagtaagaacacctcttgtttagtagcatgtcaatggcctgtttttgtcattttcttctttcttgcaccttctcttctttgacattggtaacctccatcacccctgtgttttaggctggagatgttactgtcctctgtaataggactgatcctaaatgtttccttcaagagattaaggagctagtatctcatcacaattagatgcctcaaacattaattcggatatctggttaattcactcaacccagccacttgcacacccaccaccgtgtgatgtgccgctgtacatagtaggtttctgaccactgagttaaagttcctggctactgatgatacactgctgaggtgtgttccccagttgttyactgcgtagttgcagccagccaccctttgatccacccaacctttaaccccaatttgctaccacccaggaggagccagtggagagactaggaaaatctggtttgctataaaatgccaggtgttcttcgtgtgtggcaaggacagtgggatcaggctgcactgtagggrctttatcatgaggcagccacgtggggggtgttcaccctcaggtaccagtgacaaataccagattattggaaacctatatttcttccgcacatctgtccgttttctcctctggagcaatactcttgagactgggcaggtaagccacagcccagrtcccacatgaccaggtggcagggatggctaaaaccacagtccattgttttccagcatctcctaaaatgagagcacccagaacagaaggggcgctaaatcaccacccccctaactagcgattggcttgtgcgagttgtagaccacctgttggccttgtggactggcttgatgatactgaaagtgtggccacagatggttgttgagctgcattgctgacctccaggaatgtataagaaagcctaaagcaagcaattaaacagccactggaagtgataacacttgggagtttgattatccttatgtcagaaggaaaatttgtattttctctttattgtctataaaagataaaaatttagataagggcaacttaacttttaaaaatctccagtggcaataaaaaaatcttcattaccacatttctgttgaattgtattttaaagttcctaataaaatgacatcatttactgggaaatgcttctttttcttttgaaaacaatatgacttcagccctgggtatttttttatttgtttcttaagatgatttttctgtttatctcatacatccttgaaaagaagctacaaaaattttttttgttttttttttgttgttgtttattgacagtcttgctctgttgcccaggctagagtgcagtggcacgatctcagcttactgcaacctccacctcccaggttcaagcaattctcatgcctcaggctcccaagtagctgagactacaggtgtgcaccaccatgcccagctaatttttatatttttagtagaaacagcattttaccatgttggccaggctggtctttaactcctggcctcaagtgatccacctgattcggcctctcaaattgctgggattacaggcgtgagctatcacacccagcctaagctgcaaacatttcttaatccaagtgcacaaagactatctccatctctataaccactaaagccagccatttttagaatctgtttgggatatgtggctgtttccaacttttctttaggagagttgtttgcaggctttttcgctccatagctcttcccccaagactgtcggttctaamcttgcttctcctcctcattcgctgcacatataccccttcccctatctaaataaattgcagacttctaaaatttagaatggagaaaaactggtacattctttgtcctgcacaagaaagaggtggtaacaggaatgtctgagaaaaaacgaatggcctagtgactctgtgatgcaggaaaggttgccagtctgcaaatcatagaaactgaggaccccatcctagtagctgctactcctggaaagtcyccacgttctctgtggagtccactccatggctcactcagtttctgcagatggaaagtccccggtcgtcctttctcatgtttccctctcttcccagggcaggatagcgtgtgccaatgtcctcagtgacctctatgcaatgggggtyacggaatgtgacaatatgctgatgctscttggagtcagtaataaaatgaccgacagggtaagtaggagctacccggctgctgcctggtccgtgttgtcccggtggcatctctggccttsgttagacttggtttcccatctagaaagcgaggagcccaggccatatggctccctgcactccttctggctctccactttttggcagttaccagtaaattaaaatgaggaagcckggcctagtcatctctgcacttctgccacctgctccctttctctcttcccagtagactgaaaccaagacttttttttttttttttttttgagacaggagtctcactctgtcgcccaggctggagtgtagtggcgcaatctcagtccactgcaacctccgcctcccgggttcaaacaattctcctgcctcagcctcccaagtagctgggattacaggcacgtaccaccacacctggctattttgtgtatttttattagagacggggttttatcacgttggccaggctgttcctgaactcctgacctcaggtaatccacctatctcggcatcccaaagtgctgggattgcaggcrtgaaacaccgtgcccggcccaaggcatttgtgtatatttttttttgttttattgagacagagtctcactctgtcacccaggctagagtgtagtggcacaagctcagctcactgcaacctccacctcccaggttcaagcgattctcctgcctcagcctcccaagtagctgggattacaggggcacaccagcacccccagctaatttttatattttcagtagagatggggtttcaccatgttggtcaggctggtctcgaactcctgagctcgtgatccacccacttcggcctcccaaagtgctgggattataggcatgagccaccgtgcccgacctgtgcattttttaaaataaagttttggccatagtaatggtgcctcagtgtgaatcaggcacagccttacagatgtgggacacgtggcacttagagggcactccctctgctgtggctggggatgtcgtggacgtagatggtgacgggggatagggccaccaggggctcacgcctctgtgtcatcgcctagcattctgtgcccttgctgcctgaacctgttctttgaaccagagatgaattcctatttagatagacaggtacttgtttttgtcccaagagcccccaacagtttgccctgccttagagaaacttgagtttccagtaggctctttcctgcccttgaacatgggctgtagtcatcagtggtgcatggtggtcttggcgcaggctctgtcagtgtgggttactcgtagcctgcagccaagccttggtaggatggatgcctactgcagggcaggggacctgtgcttaggaagccagtcttgagattctcaaggagcactggacagctggcttccagcagtcatcagacctagggctggtcctgtgcactgagtccagacaatgttggtgtctgggctttatttacattgttgtctagaacatcttccagcattggataaaatgatgacaatgtgaaatattttctagcttttgtttttgtttgtttttgagacaagatctccctgtgttgcccaggttggagtgcagtggtgtgatgagagctcactgcagcagcctcagcctcccgggctcaagacatcctcccacttcagcctccggaatagctgggaccacaggcacatgccaccacaccaagcaatattttttttttttgtttttgagatgaagtctcactcttgtgcccagggctggagtgcagtgatgcgatcttggctwactacaacctctgcctcccaggttcaagcgattctcctgcctcagcctcccaagtagctgggattacaggcgcatgctaccacacccggctaatttttgtatttttagtagagacggggtttcaccatgttggccaggctggtctcaaactcctgacctcaggtgatctgcccgcctcagcctcccaaagtgctgggaatacaggcatgagccactgtgcccggtcacccagcaatttttacatgtttcgtagagaaaggggtctgtctgcattgcccagactggtcttaaactcctgggctcaagctctctgcccacctcggactcccaaagtgctgggattacaggcgtgagcgattatgcctggcccctaacaaccttccctgtctgtaaactttgaggacttcctttaggattttatggttctttttataactgtaagtgtaaaaaccttcttttctgggttttgaacagaattctttgactttttatttgtacctttttcaaccttaggaaagggataaagtgatgcctctgattatccaaggttttaaagacgcagctgaggaagcaggaacrtctgtaacaggcggccaaacagtactaaacccctggattgtcctgggaggagtggctaccactgtctgccaacccaatgaatttatcatgtaagttgatttttgtttcatatcacctgacctgtttttctctctctgtcctctctttttaaaaattgatgtattaaggtcaggtgcagtggctcacacatatgatcccagactttggtaggccgaggcgggcagatcacctgaggtcaggagtttgagaccagcctggccaatgtggcgaaaccctgtctctactaaaaatacaaaaattagccaggcatggtggggcaagcctgtagtttcagctactctggaggctgaggcaggagaatcgcttgaaccccaggggtggaggttgcagtgagctgagatcatgcccctgcrctctagcctgggcaacagaacaagattctgtctccaaaaaaaaaaaagacaagaacgcaaggctgggcgcggtggctcatgcctgtaatcccagcgcttttggaggccaaggcgggtggatcacctgaggttgggagtttgagaccagcctgaccaacatggagaaaccccatctctactaaaaatacacaattagccaggcatgatggtacatgcctgtaatcccagctacttgggaggctgaggcaggagaatcacttgaacccaggaggctgcggctgcagtgagccaagatcgcgccactgcactccagcctgggcaacaagagcgaaactccatctcaaaaaaaaaaaaaaatagatgtattaagatataatttgcgtactataccattcacccatttaaagagtcagtggtttggagtatactcagagttgtacagccattaccggagttgatgttaggatgttttcattgctrcaggaagaaaccccatcctcctcggctctcactgttcactcctgctccatcctggattttgtcacttagcatagtattagcatacttttaagggtcatctattttgtagcatgtgtcagtattttaatcctatttttaagacattttaggtgtttttgttttttttttttgagacggagtcttactccgtcgcccaggctggagtgcagtggtatgatctcggctcactgcaagctccatctcccgggttcatgccattctcctgcctcagcttccygagtagctgggactacaggcacctgccaccatgcccggctaattttttgtatttttagtagagatggggtttcaccatgttaggcaggatggtctcgatctcctgatctcatgatccgaccgcctcagcctcccaaagtgctgggattacaggcgtgagccaccgcgcccggctgacattttaggttttttagttgaagtataattcacgtaacaaaatttcacataacatagaattcagcattttgaagtacacaatgtgttggtttttagtattgacaaggttgtgcacccatcaccactatccaattccagaatgttttcatcaccccaaaaagaagccctgtagctcactcccatttccctcctgctcccatcctctggcaaccaagaatgtgcttttgtctctaaggatttgcctgttctggacattgtatagaaatggaatcgtgcagcatgacatgctgtgtctggcttcactcccatagcggaatgttttccgggtccatccgtgttgtagcatgaatcggtatcgcattcctttccatggctgtataatccattgcatggatggaccctgctttatttagccattcctcaggtgacggacctttgggttgtttccacctattaggaatgatgctgccatgaacattctaagtttttgtgtggacataagttccggtctcttgggtgtatacctaagaattgactgggtcatgtggtaattatgtttaacttgaggaatcatcagactggtctccaacatggctgcgccattttacgttcccagcagcaatgtatgaggattccaatttctctatgacccctccagtacttgttttcctgtctgtcttttggattctagccagcctactgggtgtgaagtggaatgtctttgtggttttgatttgtgtctgcctgatgactgatgaggccgagcatcttttcatgtgcttactacccatttgtgtatcttctttggagaagtttctctcctaaccaagttgtcactttccaygtttgatgtcttgttaagaaaagtcagtcttttggccgggcgtggtggctcatgcctgtaatcccagcactttgggaagccaagacgggtggatcatctgaggtcaggagttcaagaccaccctggccaacatggtgaaaccctgtctctactaaaaatacaaaaaattagccgggcacgatggcaggcgcctgtaatcccagctactcaggagactgaggagagtggtttgaacccaggaggcggaggttgcagtgagccaagatcgtgccactgtactccagcctgggtgacagagtgaaactcagtttcaaaaaaaaaaagatctagaattagaaataccatttgacccagcaatcccattactgggtatatacccaaaggattataaatcatgctgctgtaaagacgcatgcacacatatgtttattgcagcactattcacaatagctaagacttggaaccaactcaaatgtccatcaatgatagactggattaagaaaatgtggcacatacacaccgtggaatactacgcagccgtaaaaaaggatgagttcatgtactttgcagggagatggatgaagctggaaaccatcattctaagcaaactatcaaaaggacagaaaaccaaacgccgcatgttctcactcataggtgggagttgaacaatgagaacacttggacacagggcgggtaacatcacacaccagggcctgtcgggggtagggggctgggggagggatagcattaggagatatacctaatgtaaaggacgggttgatgggtacagcaaaccaacatggcacatgtatacctatgtatcaaacctgcatgttgtgtacatgtaccctagaacttaaagtataattttaaaaaatttaaaaaaaaagaacatcaactttatggtacaactgagtctgaattcgaagacatttatgtcttcaggtctggtttttggaaaacaagtttcttgcgtagtcacagaattctatttttcaaagctgagagtggatacaaatggtataggttgagctggggagctgggtgttggtattgaagtctgtggccctggctttgttttcatcgacttgggtgagtacctgaggaggccagcatcggggaatggaacgattcaggagctcagctgctgaagctgcgaaaggcacaactctcagacctgcttcctggtagtgtgaatgcaagtctggtagatgtttcattcgggcaccagttgtcatcttttagaggtgcctttttagtattgccttctgtctctaagacagggaccaccaaggcgtctgggtgccaggtaggaaactcaccatcrgtcagtctgagtttgagaacctggaggcagaaatcaccaagacattagacccacagattgcctgcaaatccaccaaacccctgggccgaaaaatccgtcctgagtctctagcatatcagtgatcataaagaagcactctctgtttcagaagcttttgaatgctagtgggtctgtagtgaaaattacacatacactcgtatgtggtcgaggggaaatctgggcctgatgaaacgtttgaaggctaaatgtttcattctttttaaaaatatgtatattatttttgaaatggggtccttgttgtgttgcccaggctggtcctgaactcctgggctcaagtgatcctcccctcttgacctctcaaagtgctggggttacagaaatgagccactgtgtccagcctgatggctgaatgttttgttccagcaatagcctcagtagcaggttgcaaggctctgtcccatacatgctggtagttggcttcaatttaagtaaatgcaaaggcagatatatttttgacagattattccttctcttktgttaataacaatgagctcatctccttggttagtttgactagaacatgcccttttcttttcttcaggccagacaatgcagtgccaggggacgtgctggtgctgacaaaacccctggggacacaggtggcagtggctgtgcaccagtggctggatatcgtgagtaaaccactgctgtgatgggagggaggggaatggtacgtttgcaggtaatttttgttggaggatttgggaaatgaggttttttagtttcatatccagggagttaatattagtcaagtccttaaagaaatcctaggaattgttcatagtctttaaataacagttttgcatattgaatgcttgattgcagtaggtaagccccagcttggagctttaagatttttctgtaaagaatttgctcggcagggggttagctttgtttacttggccctgagatagcttcgtctttcatgtcttaaacatcactaagaaataatatgaaggagaattggtggaaggcgtagtgtttggggtataaataaaaccagggttattgacagtttaaattgttttatgcagtttttggttgtttttgtttggtagttttgtctttttaaactgatgagtaactcagaacattttgataaataattctcttgtgcagaatgaatctatctataatgaggatatgtcttgtgagtcatttttccagtgagctataatcatactttaagattggttttcttcattgccgtaacaactcacaaattaataagattggggtatattctcacatatcatggtgcatttaatttctacaactatcatctgaaactaccagtcctgagaaacagttgaaagagaataatcaataattacacgtctttcatcaacctggtatatcttagcttgatgtmgcagggtagagaaattctctaaggctgccacgttctttagcagtttttccctcctccccctgtgatggggagcagagcagaaggccactgcggggatgttgcgcagaggtgccttccagccccacctcccaggcctgagctagcagggagctggaagcaggtgaggcagggagtgtcasggatgggggagcccttctccactagcaggacactacactgcatgtacagcagtgccgccgtgtgtcccgctagactacacatacccaataaatcacagcacttaattacagaaatgtgggatgagaacagaaaagacgccatgctgacaggtctaatggacacctaaaatactatccacagaaaaaccagagttggaaaattcagttttctgaattaaagtccctagaagttaaataagaaaaagttgctgtttttctcagttgctagaagtaaagattaatcacattttcctctctttctctccctcacctacatttctattatcagcctgagaaatggaataagattaaactagtggtcacccaagaagatgtagagctggcctaccaggaggcgatgatgaacatggcgaggctcaacaggacaggtatgacaggtgggaagggcgcttcggtcccagggrtccaagacagtaaatgtcttaggcttttctggccacatactgtctcagggtaggtggccagatttttggccagtgactacagaccgtcttctcctggtaccaggttggcattccatagatcactgcagatggtccctgacttacagtgctttataattaagaaggaagtcctaacttctgacataccagagraactatttctagaaagcgtttgtgtgggttacctatgtaagatttggaagcaaaccattcagaatggaaatttagaaagtttaagatactggagctatttccagaacataaccttggaagtctagaagtgcccccactcccacccatcccctgcattcctgcttaggtgtaaccactgaattttgtgtttattttcttgcattttagaatatttttattgcacagcccttgtgttcttaagcagcaaattagttttgcattttttttacttgttttrttcaccattgttcctgagagtctccttgttatatgtagctgtagtagattccttttggctgtgttgatttttccactggcttctctgctctcctgtttcacactggggcgactgctatggacttccttggcccagccctctgaggcacgtgtaagagatcagtactggctcagcttttrtagatagtgccaaactgtcttccaaagtgttcaccacagtttacaatggcacactatgtttagaaagcgttttttaatatgtcttctcttcccatttattttatacattttttctactataaaagaattacatgcttattatagaaaagtttttagaaaayggaaaatagtacagaaaaaagttgtccatagtccctccacccaaaacagctccggctagcatttttatgtattcttccaggactttttttcatgtttggctggtgatttactattgttgttttaaagtagtggttagtataagttttcactatgtaatggttagtatatgtatttggagtgcctgcttttgttgttttgacatgactaatgtttcccatattatgtatcctagtaaacttttttttttttttttttttgagacagaatctaactctgtcgcccaggctggagtccattggtgtgatctcggctcactgcaaccgctacctaccaggttcaagcagttctgttgcctcagccttcccagtagctgggactacaggcacgcatcatcaccatgccyggcggatttttgtatttttggtagagacagggtttcactatgttggccaggctggtctcgaactcctgacctcaggtgatctaccctccttggcctcccaaggtgctrggattataggcgtgagccatagtacacataatttttaatgactagataatgttctaccagagaaatgtaccacaattatcttttacctattgttttacaattcatttggaaataaaaattttctgtaatttgttgttacttgtaagaaagttatagccaggcacagtggctcacacctataatccagcactttgggaggttgaggcaggaggatcacttgagtccagcagttggagaccagcctaggcaacatagtgagaccccatctcgtctctttagctgcgcctggtgcattcctgtagtctaagctactcgagaggctgaggtgggaggattacttgagcccaggatgttgagactgcagtgagtggtgatcatacccctacgcttcagcctgggtgacagggtgagatcatgtctcaaaaaaaaaaaaaaagttatagatcagaggaacagaatagagaatccagaggtaggtccatattatagtcaactgattttttttttttttttgagatggagttttgctctttcgcccaggctgaagtgcagtggcaggatcttggctcaccgcaacctccgccttccgacttcaagtgattcttctgccacagcctcccaagtagctgggattataggcgcccgccaccacgcctggctaatttttgtatttttagtagagatgggttttcaccatgttggccaggctagtcttgaacccctgaccttgtgatccgcctgtctcggcctcccaaagtactgggattacaggcgtgagccactgcacctggcctagtcaactgatttttgacaaaggagtaaaggcaattcattggagaaaagagtcttttcaccaaatggtgctggaacaagtggacattcacatgaagaaaattattctggatgcagatcttatacctttcgtgaagattaactcaaaatgaatgtttagtgtgttttcacactgctataaatagccaagactggataatttatttattcatttattattattattattattttttttttttttttttgagactgagtctcttttttttttttttttttttttttttttttttttttttgagacggagtctcgctgtcgcccaggctggagtgcagtggggtgatctcggctcactgcaacctgtgcctctcaggttcaagcgattctcctgcctcagcctctggagtagctgggattacagggcgcacgccaccacaccccactaattttggtatttttagtagagacggggtttcaccatgttggtcaggctggtcttgaactcctgaccttggcctcccaaagtgctggaattgcaggcgtgagccaccatgcccagctgactgggtaatttataaaggaaagaggtttaatttactcacagtttcacatggctggggagrcctcaggaaacttacagtcgtggcagatggtgaaggggaaacaggcacctaggttcttcatgaggcagcaggacagagaagagcaggggaaactgccacttacaaaaccatcagatctcatgagaattcattcaccctgacgagaacagcacgagggaaaccgccctcatgattcagtcacctcccaccaggtccctctcttgacatgtggggattacaattcgagatgagatttaggtggggacacagagccagaccatattgatgattcrtagacctaaataaaacacaacaatataaaactggaagaaggtaacatcagagaaaattgaggtggctttgggtttggtgatgactttataacaccaaaagcactatctattaaaaaattgctaagtttggctttattaatataaaaaacttctgctcggtgaaaaacactgttaaggaaatgaaaagacaagccacagactgggagaaaaattttgccaaacacatacctgttcaaggtcaggtatccaaaatatacaaaggactcttaaaactcaataataaaaaacaactcaatttaaacatggcccaaagaccttgacagacaccatgaaagaagataacgcagatggcaaataagcataaaaggaaaccttcagtgtggtacgtcaatagggaactgtagattaaagcagtgattgagatgccaccacatacctgttagaatggctaaaatccaaaacactgagaatagcctgggcaacatggtgaaaccccatctctaccaaaaaaatacaaaaaattagctgggcatggtggcttgcgccttagtcccagctacttgggaagctgaggttgggaggatcccttgagcccaggaggtcgaggctgcagtaagctgtgatcgcaccacctcactccagcctgggtgacaaagcragaccctgtctcaaaaaaaacccaaaaacactgataataccaactgctggcaaggatgtagagaaacaggaaggaactctcatttattactggtaggactgaaaactggcacagccactttaaaagtcagtttggcagtttcttatgaaactaaatatgttattatatgatgcagcgattgtgctccttgatattcactcaaaaaagttgaaaacttacattcacacaaaagcctgcagacaaatgttcatagcagcattattcataattgccagaacttggaagcagccattcatttcttcagtrggtgagtggatgaatggataaacaaaatgtagtgtatctgtatgatggaatataattgagcagtaaaaagaaatgagctatcaagccatgaaaagatrtggaggaatcttaagtgcatattactaagtgaaagaagccagtctgaaaaagctccatacagaaggattccaactgcatgacattctgcaaaactgtagagatgcagaaaggatcagtggtggccagaggttatcggagaggaaggggatcaggtagagcagagcactgaggatttgttacttcccacttaatttctttctaaacgcaaaactgctccaaaaaataaagtctgtaaatttttttaaaattaaataataggtcgggtgaatggataattaaataatagtaggtgagtggatgaatggataaacaaaatgtagtgtatctgtagtatggaatattattgagcagtggctcacacttgtgatcccagcgctttgggaggctgaggcaggacgattgcctgagcccaagtgcagtgagttatgatcatgccactgcactccagcctggtcaatagagcaagactctgtctcttaaaaaaaaaaaaaagaaagaaatttaaaaataaacttgcacgcaattcacctttcgcgggagtaccttgatactgagcaaggccttcttaaaaagtgctggtcttggccgggtgtggtggctcacatctgtaatcccagcactttgggaggccagggcgggcggatcatgaggtcaggagttcaagatcagcctggccaatatggtgaaaccctgtctctgctaaaaatacagaaattagctgggcgtggtggtgcgcacctgtagtcccagctattcaggaggctgaggcaggagaatcacttgagccctggaggcagaggttgcagtgagccgagatcgtacgactgcaccccagcctggatgacagagcgagactccatctcaaaaaaggaaaaaagtgccggtctttggttttaggatggtcttggccggtttaccttccactgagatcataatccctctgcatagtttttttagtttactggaaaactactattaattgaagcttctgatagttttcaggtggctcaaagtgaaataagaacttttggaatttcactatgtctttggttgattttacattgcgttttcattattccgatacgtcatctccctgacaagtaaggaagttgcagattaattgtggacgtaagatttttgagttgaggaaaggtgttttttctcagagccgccccctctctctcccagctgcaggactcatgcacacgttcaatgcccacgccgccactgacatcacgggcttcgggattttgggycatgcgcagaacctggccaagcagcagaggaacgaggtgtcgtttgtaattcacaacctcccggtsctggccaagatggctgcggtgagcaaggcctgcggaaacatgttcggcctcatgcacgggacctgcccggagacttcaggtacaggatgctgggcgcatctgaggactaaatagtgaggctaacagaaagctcagcgagaaagcagcagccccaccccgagtgggcccccactctgttcgagttccatgctgctgacctcggcctccgcagcagctggtgcctttcctcctcccggtgggtctggtccccgccatcctgggtggatccagcagccttgctgaggttgagtggcctgtgctctttttgatgcaaggatatggtgatgggggaaataaggtagcattcagtttttactgaaagcttcgcatttgaaattaactgtaatacccctaggttactttgaacaggtgatatttttttccttgaaaattgtctaacgttgttttaagaatgatagagagaaaaggggccaggtgtggtggctcttgcctgtaatactggcacctcaggaggctgaggcaggcacatcacgtgagatcaggagttgaagaccagcctggccaacatggtgaaaccccatcttcactaaaaatacaaaaaaaaagtagctgggcgtggtggtccatgcctttaatcccagctgcttgggaggctgagccaggagaatcacttgaacctgggagacagaggttgcagtgagccgagattgcgccactgcactccagcctgggtgacagagcgagattctgccttaaaaaaaaaaaaaaagaaaagagaatgatacagaataaaaaagaatgcaataggatattatgtctttaaaatgccatttttcttttttcttagatgtgcagtaatttattagaggaaacataaatggaggataaaygggagatggagcaagcgtaggtagagagagccatcagacagcagtgcaggtctgacaccatacgccccagtagtttgactcctagggagcttttatatcccttatcatttttctaagattaagctccttttgtttcctgattaatttggtggccacatctgtccggaacttgtgggacgtcctcctcttcatcatggcagrtactccagcatggcctgccggccgccgaggccrccacccacagcctacaggctcgccatcgctcattcccactcccgcagccccagctggagccagatggcgcgycctcctgaagtaccatttctcttttgccccctttgttccctttacctttactgttttcatcttttaagtctccctgttttyccctttttttcrgtttctctctttttctatttcctttcctctagaactctagttttctacccgcaaaagagtggaatcaccttaggattttaaatatacacatgccggccaggcctggtggctcacgcctgtaattccagcactttgggaggtcgaggtcaggagttcgagaccagcctgaccaacatggtgaaaycctgtctctactaaaaatacaaaaattagcggggcgtcgtggcgtgtgccctgtaatcccagctactccagaggctgaggcaggagaatcgcttgaacccaggaggcacaggttgcagtgagccaagatcgccccactgcactacagcctgggcgacagagtgagactctgtctcaaaaaaaaaaagaaaaatacacrtgcctagccccagcctcccaaaaacggtgggatccatctcgggtgggcctgggcctcagcatctgtgaaggctgcctgggagattccgtagtaggccggggcaagggaccacagtgctgggaccacaaagccctggtcacgtcgacctgtgctgtggcgagggggcttcaggactctgccaggcctctcaccgccwttatagaggacgcttcagcctcccgtttaaaaaaacaaaccattttctagaagtaagctccaacagggcagggtttttttcccctgctggttcaggctctggccaggacagtgtctgccacataattgggcactgaatggaaattgaatgaattgacgaatgttaccagccatttaaatttgtttcctttcttcagaaataggaagtttttaattttatgatggagttttcctcttgtcacccaggctggagtgcaatggcgcgatctcagctcactgcaacctccccctccccggttcaagcgattctcttgcctcagcccgagtagctgggattacagggctgtgccatcatgcccagctaatttagagacgaggttttaccatgttggccaggctggtcttgaactacctcctgacctcaggtgatccacccgcctcggcctcccaaagtgctgggattacacgtgtgacccaccatgcccagccacaaggtttttacattttgtagaagtagactacagtttttcctcatcatcttatttctacttagagaaataaattttggcccggtgcagtggctcacgcctgtaatcccagcactttgggaggccaaggcgggtggatcacgaggtcaggagatcgagaccatcctggctaacacggtgaaaccctgtctctactaaaaatacaaaaaattagccgggtgtggtggcgggcgcctgtagtcccagctactcaggaggctgaggcaggagaatggtgtgaacccgggaggtggagcttgcagtgagccgagatcacaccactgcaatccaacctgggagacagcgagactccgtctcaaaaaaaaaaaaaatttatggcctatttactggaaagagcaacaaaggtttattttaatgtattttatactgtttgtcttttggatataatgacagagtcatgactggaacctagatactttggggcatacactgtttcatgagtcttaaattttctaaaaatacaaaaaagcattctcggtaaaatgagagagtcgatgtagagaatcaaaagttcccttttgtytgtcaatatttgtttcagtgtagcttggaaaaaatagctaccacatgggttattgaagccccaaacaccttacccctacacagtgttatgtggttcacgaataggtcattttcacagttgaaagttggagtgtatatgtgtgtgtgttaggagtttactagcaattgcttaattacagcatagaacaggcctcttaggctgggagtggtggttcattcctgtaatctcagcactttgggaggccaaggcaggtggattgcttgagtccaggagttttagaccagcctggacaacacagtgaaaccttgtctctacagaaaattagccaggtgtggtggtgcacacttgtaatcacagctactgggaaagctgaagtgggagggtcacctgagccaggacattgaggctgcagtgagctgtgattgtaccactgcactccagcttgggccacagagtgagaccctgtctcaaaaaaaagctgcttagttgaatgggaagagctacttgcatataggtggcagcaagttgttgatggaagttggatctctgcagaarcagcagaggcagagaagctgctgtcatgtcaacactaacagtcattcttgttttcttttgccaggcggccttctgatctgtttaccacgtgagcaagcagctcggttctgtgcagagataaagtcccccaaatatggtgaaggccaccaagcatggattattgggattgtagagaagggcaamcgcacagccagaatcatagacaaaccccggatcatcgaggtcgcaccacaagtggccactcaaaatgtgaatcccacacccggggccacctcttaatctagacagaaatagctgtttggttttgtttttaaatagatctatttcccttatcacttcaattaaagactataaacaacaaaaatctcattgtgtctacacatcggggtgaccttaggtcggtttgtaagtggatacaattaataaaataaaatccattgcctttttttcctgttacattaactgaagatgcacctaatcttgaggcagcttctgagttgagaattatattgttatccaatactgttgattcattttgaatctttagacacttatctcttgccgcataggctttttaaaggtgctttcacatagcacaggcattacccgtagtcgtgtcaaatagcagttggtgtcttcattttatgtatatttatcatataagtctgatttttttttttaagcgtcttgaatggttttctggagagacagcattggtaagtggcacatgacggtatcccagtcataagagggttgcatgattcctttgagtgtttgatttgaaaagcctagtcttgtctctcaagagcatctcggacccagaacattctccagtagtgcattcagttcaacacagcaagtgcttcattgcatggaaaacactttgaagacaaaaaagaaatcttatttctttttttgtagccttcctgatatttacagtaataccattaactgttttatcgatagcaaaaaaggatactttttgcaatgttattagatgttctatagtgctacaaggaattgccttccgaatggaggttcatgtataatactcatttacaattcaatatataattacacaaataatttttaaatataatcaatagtaaagactgttctgtggatggtagtgtttaatacattttctattttgtacagtgatttcaggccttttgttttcttaaaatcagcagctgtttggcctaattcttagcattattttgtcctttgcgccagtacttttttgtgcaygctttttgtgatctgtgttaaaaacctgcattgccaacattgcagctcgaacttaaacttgttattcaaataaatatttaattttttaaattgctcttgtataatcagatgccccttttagtattattttagaagcgttgggagggttttgcctaaagtacaatttatcgggaaaaactagattttagttttataaaacttttaagtctttcatgggacctatattttcttgaattaaattttgtagttctagaataaataggcaatctaaaaaggtgttctctgtgttatgtaaagtggaggcttccttatattttaacctactaagcaatgaggagggattcctgtcattaagcacaagggcgctggatcctcaagtgcccatcttcgtgagagaaaaagcagcacatcctgcccatttctggtgctttctgctcacaggcaccaaagctgcacatgtaaactgactwcttgccaaaggaaatgacccctgggaagttcaagctcctggaagaggctttaactcggacgcgccctcctccaggaaccagtgggcagggcagccttcatgcatgtgtaactggacctccagccataagcatggtgtgcagtatggaagagcctgctacggaactgaaagtgattggacattttataggaattgatagagatgttggtcctcaaaagctacaaaccagtggtctgcaaaataaagtgtgttggaaacctctagtgagataaacctactgttgagcttttttttttttttttttttaaataacgatgactgaacttcagtgtagcctgtgccgtgagagctggtgttttcctcagtggcaggcctattgagaggagggagctaagtggagtatgtacttaaggaaataatatttgtgaagattgatatttataaagagaaaatgttgggtacttagaggtccgtgtaagtcttatgatcccaagaggaagaatttgtatttaaagcagtgttggctgggcatggtggctcacacctgtaatatcagcactgtgggaggccgaggtgggcagatgaccagaggtccagagttcaagaccagacttgccaacatggtgaaatcctgtctttactaaaaatacaaaaattagctgggtttggtggcgcacacctgtattcccagctactgggtaggctgaggcacgagaatcgcttgaagccgggagatagaggttgcagtgagcaacctgccatcacaccactgcactccagcttgggcgacagagactcagtctcaagaaacagactcaagtctcaacaagcaaacaaaaaccagtattgtatagtggcccagattcacctgtgttagaatcacccggggtgttagaaggcaacattcctgcccctgattttccagattcacagaatcagaatttctggggtgtgggactttgggaatatcttaaataaggaccctatggggctatggccaaaaaagtttcagaaccatgggtgcagcacaccaacatggcacatgtatacatatgtaacaaacctgcacgttgtgcacatgtaccctaaaacttaaagtataatttaaaaaaaaaactgatctcaaaaggaatgttgcagaggaaggcagggaaagtaagaggacctggttttgcaactttttttttttttttttttttgaggcggagtctctctatcagccaggctggagtgcagtggtgcgatctcagctcactgcaacctctgtctcccaggttccagtgattctcccgcctcagcctcccgagtagctgggattacaggcgcatgccaccaagcctgactgatttttgtatttttagtagagacagggttttgccatgttggtctcgaactgagctcaaacgatccgcctgccttggcctcccaaagtgctgggatcacaggtgtgagccaccatgcccagccttttgcaacatattttgcaggaattttttcctcgaccattctcttaccgaccattccgaccaaatcttgaccattctgtttacttcccacatctgagctacggcccagcaaggcagcagaaagacctgtattttgaaagctccacgaagactcaaatgattgtcactgaatattggagttcttggcaaaatctatgtagaacattttaaaagtcagtggacaggccagacatggtggctcacgtctataatcctagcactttgggaagctgagacaggaggatcacttgagcacaggagttcgagaccagcctaagcaacatagtgagacctcgtctctacaaaaaataaaatttaaaaagtgagtggagagtaagtagtcgatttgactttctggtagcactttaaaacttcacactgaagtgtatttatcttggtatactgatttgttttctgtaaatcatatagtatagttgcatccaaaaatacagtctgttagaatgcatagaattagtgaatacaacctgaggcagctggatcatggtggagtcagtcattcaggcactaggaataatctgaaggaatattgaagctgcttatttgcacaggctgtgttgaggtatttattgtgtttcagtccaagaaaaattgaaatattgtataagcaatatgtactttttggctcagtctttaaaaatagtagattatagtcttccaagttctgcatgctttataatgaataaatgtgtttcaaattgttctgtttatagatgaatgagccaggcattttcagtctgaatttagcattccctttaaaagagttatatctgagttctcaatcttagttttaattgtatagagaccagaatagctatactgtgctgcactttatttttaggtaatagagcaagcgtagtcatcgacgcttcagataccagtcgtgtccgtgtgtgtgtttttgtgtatatttgtttgtatatatccttgagttgctcacttccacacccagcccaccctttcctctagcttaggcagtggttgcatagacaacataatttactttgaacagtaatttgtaaatttttctcattaagaatccgcatatgaattatagtcattacatatgccaaggggcacagtgaaaatcaccaatgtcctgttaaaagtgaagcctgggaatatcctgttatctatgctgaaatctctgtgtcttgaatgaggatgggagtggatggattacacaaggtcttcattcggtaaagcagtaggtgagacggtgctcccataggcatctagactggttctggaattgcctggaatccaagcctgctgccaatgccaaatgctttgatttgtctgtgaattcagggtaaggaaggtgctgtaagtttccctatgtttcacagtccttaaatatgacatccagcactgaacacacagttgatgctttccatggtttttgtcctttctaagtcctgttgctttcagagggagttttatgcttaggagaaactgcatgtaatgaagcctatcaaagcttcatagaaacagaaaagaccatgtgcggtggctcacgcctgtaatcccagcactttggggggccgaggtgggcggatcacctgaagtcagaagttcgagaccagcctcaacatggagaaaccccatctctgctaaaaaaaaaaaaaaaaaaaaaaaaaatacaaaattagccaggcatggtggtgcatgcctgtaatcccagctactcgggaggctgcggcaggagaattgcttgaacctgggaggcggaggttgtgccgagctgagattgcgccattgcactccagcctgggcaacaagagcgaaactccgtctcaaaacaaacaaacaaacaaacaaacaaacaaaaacagaaaactcactctattagtgatctgattgcagaaaagccagtgtgttttctactattatatttttagaacaagcataggcccgtagaaaattataagggcctggctgggcacagtggctcacgcctgtcatcccagcactttgggaggccgaggctggcagatcccgaggtcagcagttcgagaccaaccttaccaacatggtgaaaccctgtctgtactaaaaatacaaaaattatccgggtgtggtggtgcgcacctataatcccagctactcgggaggctggggcaggagaatcgcttgaacccgggagccagaggttgcagtgagccaagatcgtgccattgcactccagcctgggtgacagagcgagactttgtctcaaaaaaaaaaaaacagaaaagaaaaaaacgaggccgggcgcggtggctcacgcttgtaatcccagcactctgggaggccgaggcggcggatcacaaagtcaggagatcgagaccacggtgaaaccccgtctctactaaaaatacaaaaaattagccgggcatggtggcgggtgcctgtaatcccagctactcggagaggctgaggcaggagaatggcttgaacctgggaggcggagcttgcagtgagtcgagatcgtgccactgcactccagcctgggcgacagagcgagactccatctcaaaaaaaaaaaattaaaacggcctataaaatgttaacgttgatcattacccagtatccagtcctatatgttgcttaattcttttttttttttttctttttttttttaggcagagtctcactctgtcacccaggctggagtgcagtggcgtgatctccgctcactacaagctccgcctcccaggttcaagccattctcccgcctcagcctcccaagtagctgggattacaggcacctcccaccatgcccggctaatttttgtatttttagtagagatggggtttcaccatgttgggcaggctgatctcgaactcctgacctcaagtgatgggggtcactcagcctcccaaagtgccgggattacaggcatgagccaccgcacctggctggcatatctctttcttactacatccaggaaacgtttctccattttcaggactcatgattgcagtgggctcacccagataatacggggtgatccccctatcaaagtccttaacgttaatcacatttggaaaatcccttttgccgggtaaggtaacagccacagattccagggattagggcgtgaacatctttggggaggaccgttattctccccaccacaaggccatatacccacggggtagcttcttcaccaggggagagatttttgcagccatgaagcaaagctgttgcctcaaacatggtatttttaaaatcagtgaacaagaattgcttacacagccataccaagcgggggccagcagggtggcaggtctgttcaccactagctaccaagctttgtgcacaaagcaaacgtgggccactagacaggctgtggcagaatcgacttaccttttttttttttttttttttttgagactgagtctcgctcttgtcacccaagctgaagtgcagtggcacgatctcggctcactgcaacctccacctccagagttcaagagattctcctgcctcagcctccccagtaggtgagattacaggtacccgccaccacaccccgctaatttttgtatttttagtagagatggggtttcaccatgttagccaggctggtctcaaacttctgacctcaggtgatttgcccccctctgcctccccaagtgctgggattacaggcatgagacactgtgcccggctggaatcgacttttcttttttctttcttttttttttttttgagatgtggtttcgctcttgttgaccaggctagagtgcaatggcgtgatctcagctcacggcaacctccgcctcctgggttcaagagattctcctgcctcagcctctggagtagctgggattacaggcatgtgccaccacgcccggctaattttgtatttttagtagagacggggtttctccatgttggtcaggctggtctcgaactcccaacctcaggtgatctgcccaccttggcctcccaaagtgctgggattacaggcatgagccactgcgcccggctggaatcgacttttcttttttctttctttttttttttttgagatgtggtttcgctcttgttgaccaggctggagtgcaatggcgtgatctcagctcactgcaacctccgcctcctgggttcaagagattctcctgcctcagcctctggagtagctgggattacaggcatgtgccaccacgcccggctaattttgtatttttagtagagacggggtttctccatgttggtcaggctggtctcgaactcccaacctcaggtgatctgcccaccttggcctcccgaagtgctgggattacaggcgtgagtcatcgcacccagctggaattgacttgtcttttctttttattaatttatttttttctgagacagagtctcactctgtcgccgaggctggagtgcagtggtgcaatcttggctcactgcaacctctgcctcccgggttcaagtgattctcctacctcagtctcctgagtagctgggattacaggtgcgcgccactaggcccagctaatttttgtgtttttagttgagatggggtttcaccatgttggtcaggctggtctcaaactcctgacctcgtgatctgcctgcctcagcctcccaaagtgctgggattacaggcgtgagccaccgtgcccggcggaattgacttttctatagtgcaaggataacctagcagtttctgaccaatgttttagagaacatcctatcccaaatacttacattatacaacagcagagaaattctgtacatgattcatcttctaagtgtcttcctc

SEQ ID NO: 94658 - DNA, 40869 bp, Homo sapiens
cctcatttaaattatacttaaaattttcaagtttttatctgtagaagtaacctaacctaaaatcactaacttttcaaaattctcaacagattgtgaggtttcaaaaaggctccacagacaatgcttctctcaacctgagcaaatgaccatcttcattcatctagttgttctattagtaatctgagaggaattcttgacacattcctgtcatcaagttctgaaggtgcaagctcccaatcttctgaaacccacttcctccctcaaccccactgtcaccatcttagttcaagccactagcaggtctcacccagtcaaatgcaatatcctcctaacccgtcttccatttccacagtcacctgccacagctgcaaactgaaatctgatcgagtcattctcttgctcagagcccttcaatgccttcctgacgttctcagaataaattgcagcatctttaacatgactcccacacacacccctaatcttaactgtcctcccccatgtcatcaactgtgaatctcatgccacttacccttctctcactccccatactctagctacatgacctttcccaagcttcttgtatgtcaagatcttccaggcctagagccttcattaatgctgttccccccacctggaagattcttcccttcagccttcaactgactacattcctccaatcttcacatctcagaggctccaaagatccttcttcggagcattccccgaccctcctcgcgatcctcagctctcccagcaatttaagggtaatgaccaccccactttctgcatagcacttatcccaattttcattatatattctcttgtgtgtttgctatgttcatcttagatcaatgataataaaagtagttccatgttttaagagcatacaatatagtgggcattagactgaacattttatgtattatcactttgtatctttgcaatgaccctacaaagtaagttctatactgtcatttgcccaatattcagacaaggaaactgaggcacagagggaagggctagaaaatagcaaagatattacttaaaattacgcaatctgactaaagaaacagcaccatgccatgctggctttcacaaatatgaagctgaactgtcaactccaaaagggcagggtccctatgtgatttgtgggttactgtaaagcaccgtatcgtgttgtttaacagtactttttttttttttgagacgaagtttagctcttgttgtccaggctggagcgcaatggcatgatctcggctcactgcaacctccacctcctgcgttcaagtaattctcctgcctcggcttcccgagtagtaggaatcagaggtgcccaccaccatgcccggctaatttttgtgtttttagtagagatgaggtttcaccatgttggtcaggctggtcttgaactcctgacctcaggtgatccacccaactcggcctcccaaagtgctgggattacaggcatgagccaccgcgcccagccctgtttaacagtatttaacatcagtgcttgcctaagccacaggccatgcaaacatctggccagggagaatcatcataggagctcttcaacatgtttacactactgagatttaccaattattttctaatattaaaagctattttacttatagtctcatttacataagcttattatatataagctcatttataaagcaaataggtacacgtatttgagaataaaactgactgggcacagtggctcacgcctgtaatcccaacactttgggaggctgaagcaggtggatcacctgaggtcaggagttcaagacagcccggccaacatggtgaaaccccatccctactaaaaatacaaaaattagctggatgtggtggcgcacacctgttgtcccagctagttgggaggctgtagcaagaaaatcacttgaacctgggaggcagagattgcagtgagctgagattgagccactgcactccagcctggctgacagagcaagactccatctttaaaaaaaaaaaaaaaaaaaaaaatgccgagtgcggtggctcaggcctataatcccagcactttgggaggccgaggcagccagatcacgaggtcaggagatcaagaccatcctggctaagacagtaaaaccccatctctactaaaaataaaaaaaattagccaggcgtggtggtgggcgcctgtagtcccagctacttggaggctgaggcaggagaatagcgtgaacccgggaggcagaccttgaagtgagctgagatcacgccactgcactccagcctgggtgacagagcgagactctgtctcaaaagaaaaacaaaacaaaaaaaattatatctgtaaatatcctaaagttgagacttatctgactttcctactgtttcctcagcctcaaattattcaaagttaatgaggcgctacattaataattttcaggttattgaggctctgtgaataccaaaaacagaaatataatccagaaaaccacactaaaaacccaacaggcaaaaatatggggtccagttagtagtactgaaaacacacaattcttactgtatttctatagttccttcatccaacaaatgtttatcaagcacttctgctatatcaggcactgttccatgagctggggtgaacaaatgggccaagtccctgttttcatgaaactgcattctaatggaacaattaacaattgtcaggtggaagtaagtgttatgcagaaaaatgaagggaggtcagggcatagggttactgtcaggctattttagaaaggctggtgagggctgaacactcataacgtgacttctgagcagactcgaattaaaaaatgagaacttcactaaatcctatgattcttcaacgttttcaagtttgcatccaaaagactgaaacacagtaacttcttccctttattctataaatagggaaactacctgaacagcttctagaaagtggagggggggccacggtagttcaatcgtggggaagaaaatgttgaggaattagatgataaagcctgtttgcaacagtgaatttttaatcgtcaaaactgaaggatctcaaagaattttaatatgtacttcccccaccctgctaccgtcagaaggaaaagttgtcatcataactgttttctaaagacagagatgaaaggaactgctcaatttcacaacttgtaattattagagggaaaagtacttaatgttgaaaatattaagtgaacattgagaaggaatatgagacaaagatcagcacatcattttggctaggagagaaaaagagctaaagggaaagaatggtgcctaagctaattcattcattttatgtgtttctttatgataaagtttaagaaatttttttctaaaatactttaccttcctgaaaccaccagagttccatcatcgagtaaataatccttcacattctgaggaagtggaagaatgacactaaaaaaaaaacaccaaaaaaggcatcattttaaaagaccaactataagcagagagaaaaatctctacacttgattaattttggaattgtctttcttttaatataaagtagaaaatgttaatgatgtacatttggtagcagtagacaagaaatcagaataataagattactgcggttcatcttattgccacaatggtctttgtagtaaacaaaaaccagccaaatccaaaccaccagatggaaatcacagtatgaaagcaacaagctcaaaaggattctgagtgagcacaacatttatgtgtctttaagaaatcagagaccagcagatatttgctgcaacacaggaaatgcagcaaacccaactagaagatgactagcatttggtcaccttctaaagatagagggcagaagtagagtcaagatctggaaaccattcttgggttggcagtgagcacctaccgctaagaattcatgatacttttggatgtgtcttgctggctttctattcaactgatcaccagagatataaagctgcttaaactaggcatgctttagcttaatttgtttcaggtaatcataattaaggatggcaaagccatacctgaagtctcttaaaaacttatgggataatttgttttttaccttgaaataataaattatcaaaaagccctaccacagatccctaagagtgctggtattattttgattttgaggcatatacatcttcaaaaagtggaaaagattacagcctgctttcccgaagttaacagaacatcaatgacttataacatgtctcatttatttatggaagaagttttttttggcacattacaaatggtttttttgcacaaaaaagagtattcatgggctacttcggttttaaaaataagtatttttatttatttttaaataaataaaagatcactgccactgcactccagcttgggcgacagagcaaaaacttcggttttaaaaataaatatttgatttatcaaaggtacaatttcacattcaaaaatctagttctggccgggcgcggtggctcacacctgtaatcccagcactttgggaggccgaggcgggcggatcacgaggtcaggcaatcgagaccatcctggctaacacggtgaaaaccccgcctctactaaaaatacaaaaaattagccgggggtggtggcgggcgcctgtagtcccagctactcaggaagctgaggcaggagaatggcgtgaactcgggaagggaagcttgcagtgagccaagatcgctgccactgcactccagcttgggcgacagaacaaaactctgtctcaaaaaaaaaaaatctagttcttcaggcttttaatttcttctaacaaatcttattacgtttgaaaatctactaaattttaaacaatttcaagcgaaactttgcaacttaaaagtctctttaaaattttaaattctattcataaaccactcaattttctttcttaatatgtctatttgctgattacaaataagccttcctaagtattttactcttacaaagctaacaagcgaaattgttaagtacaatgaatctaaggttctaccacacattccaatactatttaagaacttgaaacttttcttatacattttaaccattctaagccagttacacattttcaagtacatatccgatctttattgaatgaaaccatcatataatgaatcagcaattactgaaatgttggctcagaaaatcagttaagtgcaaagcccagattttctatcaacgcctttaaaaaaactgagagatgaaattgtatatattaatacttgccgcctacctgatgtttttaagtatatatacactgtggaataaatttagctaacaaatgcattgcctaacatagttatttttgtggtgagaacactaacatccactctccgtttttcaagaatacgtatatcgtcattaactatagcctccatgctgtacgacatatctgtgaacttgttctcgtatctaactgtaattacgtatcctttcaccttcccaatctccatcctctggggtgatggcgaaaagcaattaattctccgagtgcacttaggcagtgatcaccttgcgcctggggccattctaaaagtagtggtggtgaactcccaagcctaaactaggttaatccactattcctcccgcctccgaccctcactgaaaaccacaactgaccctcctagccagcacactcgctggctcgcaacaggacgcagacaattgctgatgtacttccctctcgacacactccctcccatgcagtcgctagaaggcctgcatttttttggatagcagtaagattcgctcagaagtcgcagttcccttttgccggtcgaccgggcgaaccccctcccatctcacctcttgatggtaacgcctcggaagaacgggtaccacgcggagaactggcagtgaagcacatgctccttcttcatcctccagctgccgccgctgctgcctttccctctcctgcctgcaccctcccggaactctgggcgccggccccggaagtgcccgccgagctattttggttcaaggactcttccggtccctaaagcaagaaggaagaccgagaaaaggaagcggaggagaatcccggggcatacgcttgacacacacgcatacaaaaagagctttagtctcgaaagaggaattaccgaagtgtcgagagaggaattttaagaagtttacaactccgtcttcgccctaaacgcacgctgacccggaaagtaatctcctgaagctaggtcaaaggcgggggttctacggatgccggaaggagggtgcgcgcccatccttttagcaccgcgagaggcgccggtgtttcgagccgtggcaccggcatcggctgacactgctgcctccagctagttatttcgtcctcttccgttcttcacccctacaccttggagtaagtaaccggggcaagccagtcacagcacaaaacctctttggggaggagaagaagaaggggaaagggaccacatctgcatggtgcgtgcagccgcgcggtgtctcccaggctgcggctgggcacgcgtccaggcgcccaagagggaaactggggattggagggaaattgtggattggagaggaagagcctgggctactccgagtaaagaaagcggggaacaccacagctaagtgttagttccagtgtaaagattgcagcatctgcagaggagtagaatgcttggtagagggaataccgcctgtacgatcctggagggttcgactttgggaggtaaaaggcgagaggtaaatgtgagaaagcagaggaaagaggagtctccttggagcgctgaattcgtttagtctggcctcgcaaaagttgtcaacctggaaaaaacgcagatttttatcagtattcctgcgatgatcgaatcataagactggaagaattcgaatcgaacttgtactatcgttttttcctttgcttcactcctgtcacccagcaaagttcagttttgtttgtttcgttaaaagaatgagaagtaactagctgcttttatttatttatttgagacggagtctcactctgtgcccagattggagtgcagtggcgcaatcttggctcactgcaacctccgcctcctgggtttaagtgattctcctgccttagcttctcgagtagctgagagcgcgcgcgcgccactacgccggctaatttttgtgtttttagtagagacggcgtttcaccatatttgccaggctggtctcgaactcctaaccttaggtgatctgcccgcctcagcctcccaaagtgctgggtttacaggcgtgagccacggccccgggcctaccaaccagccgcttttaayccctagtcgtgtcgcttaccacacgagctttaggcttgcgcgaggcatctgcgtctaaaagtatctccttaaatgtacattcttyctggttcacctaagtagttttaaattagaaacagccccaccgactgcaggcctcttcagaagggtgttccttagaataataaacaattatctgcgtattttgagttagaaactcttccccccaggaatatatacattgttttgggttgtgttttgtttttctcaaaaatgttactggctaagtggctagttggaagcagtgctttaaagaatacattttcaaagcagaggtaaatagattataatgttgcagagtatgttggtggggatggacagtcatgattcatcatttatgccttgatccggaactatgcagtcctttctgatttgagggaaagaagcaatattgtatatatgtctggagggtggtgccagaaagacttaatggcagacaggagcagtcgctcaaataattgttttgatttgacttagaaagtaaaaaattgcgcggaaggagatgttagcatcgatgggggatttatttaggtcagatgttttctaatgaagataggaatgaatgtacggaagagaatagatcccgggaacrtagcccttctgcgaggagcagtactttaacagcccaagaaacatttgagcataggccgggcgcggtgcctcatgcctgtgatcccagcactctgggaggccgaggcgggcgcatcacctgaggtcaggagtttgaccagcctgtccaacatggcgaaaccccgtccctactaaaatatcaaaaattagccgggcgtgttggcgcatgcctgtagtcccagctactcgggaggctgaggcaggagaatcgcttgaatccgggaggcggaggttgcgatgagccgagatcgcgccactgcactccagcctggcaacagagcgagactcttttttttccgtctcgggaaaaaaaaaaaaaagagtgtagagattaaggcagttgcaaagctttaatatagaattgcagttgtgtgtagaaaagcagctaagtttgtaagcttaaatatatagatactacagggaaggaatttttatagataccttttattcaggcagtatactttagaagtgtgttcartgactttttggtattacagttggttttaagtaacttgttacacatttaaccagcatcaaataaattgacattatacataggagatgctcaaatactttgaatggatacagctaaatgagggttcactgtattttaaccaccgtggttgtcttcactaagccatgaagtcattgtattcatcaagtttctccaataaaacctttcaacagtggaaatayttgctttttctcctgcatgctgaaaagtcagtagtcatgtgattatgggggaggagatttattgtgcaattcctaatgaagtaatgaaaaaacacatttctttctctgaatccatagcatgactaatcatcctagattaagattttcacctgtctgctggttttcttcatctggatgtctgctatcacctcaaacaagcgtgtacagatttgagctctgcatcaccccttttttcttccgatgtcccagtctcccttaaaactgtcttcgtggaaattaaatgtcactttgccacggctaccactctactccagacctgtcatctcctgcctggactatctttacagtgtcgttactatacgtctgtaaccaattcaccttcccaagggtcattacagtcagttcactcttgctcaaccagcattaaatgtgaggattttaaaccacctgctaaatgattcctggagmtcaccaagtagcataatttcagtaaacgttaattmctccctgcccacccaactgccacacctgaagagaatgaaaaaaaaacccataagtgaattcaattgtgggtacccaaattttttaccataaatggcacaaaagaaggatacatcagaatattatcctttttttttcttttgagacagagtctcgctctgtcgcccaggctggaatgcagtggtgcaatcttggctcactgcaactgctgcctcctaggttcaggcttttctcgtgcctcagtctcccaagtagctgggactactggcgygtgccacctcacccagctaattttttgtatttttagcagagatgggggtttcactatgttggttaggctcgaactcctgacctcaagtgatccacctgccttggcctccgaaagcgctgggattacaggcatgagccaccgagcccggccagaatattatcttttaaaaatagaatttaaaaatttttaactatgaccaaaattattaaatataactgcaaattatttgattctttgttccttctaaatcaagtgacttttctttgtaattattctgccagaatgtagattgccactttagacatgcccaatttgatgcctgactttaacaagacaatcataaagtaagttattactgcaaaaaaaattgatcctctctcccacttaatttcttttcttttcttttctttttttttttggagacagagtctcactctgtcaccatgctggagtgtagtggcatgatctcggctcactgcaacctccacctccctcgttcaagcgattctcctgcctcagctccccacttaatttctttcaaagtgccttgttgatttccctattcaattattaaactgttccaagtgcctgaccctcttttgtcagtcagaggctctacttatgatgtgggctcctgcatcttgtatttggttgagtattgttgatattaacaatattcatcttttatcaggagagacctagccaacatacaatttcttgttaggattttttgcttcactttgcagcctcagcagatggccgggattcgggtacggtgattgagtaatgagcctcagtgccaactgcagaaccaggcttttgagttcatagtttaacttctggaatctaaactcccacttaactctttatgcagctgttgttactaatactggcatactgaagttggtgaaaaattaatcacttcctccctttctgtagagggctgtacttgctgcctaaccccaaaattagtttattttggtgtttgttttttcattttttacataggatctcactatgtttcctagggtcatcatgaattcctcagctcaagcgatcctcccacctcagcctccacaagtagccgggactataggcacatgcagtgcatggcactggcccccaaaactacctcatatcacaacagtaatttgtgccatgccagttagctttgtgtgctttgttggcctgcagttttgggggcagagatccagccaaatctgtgtatggccttagaaatgtgttcgcaaatcatcattatatgtggagttgttttgggagttttgtggtggtggtggtttttcctttgtggttttttttgttttgttttgtttttgtttttgagacggagtcttgctctgtcgcctaggctggagtgcagtggcgcratcttggctcactgcaagctccacctcccgggttcatgccattctcctgcctcagcctcctgagtagcccggactacagcgcccaccaccaagcctggctaatttttttgtatttttagtagagatggggtttcaccatgttagccaggatggtctcgatctcctgacctcgtgatccacccgcctcggcctccccaagtgctgggattataggcatgagccactgtgcccggcctttcctttgttttttaaaggagaaagtggaggaggagcttgagaaccacagagctcgccatacactcagaatttctcacccttgccccggtgtctctgcctttgttcatgtggtgtcttctagttggaatgctttctctgcactcttggtctctaaaccatgtcttcacatcaaactatcttttaaaaatcttggctgggtgtgatggctcacccctgtaatcccagtgctgtgggaggccgaggtgggtggatcacttgaggtcaggagttcgaaaccagcctggccaatatggtgaaaccccgtctctactaaaaatgcaaaaatcagccgggtgtggtggtacaggcctgtaatcccagctgttcaggaggctgaggcaggagaattgcttcaacctgggaggtggaggttgcagtgagccgagatcatgccattgcactccagcctgggtgttgcagcgagattcagtctcaaaaaaaaaaaaaaaaaaaaggctttatcattttcctcactgcctcccaaggggatgtgtgtgtccctcctttaaaacatcctggtatggtggtgtctctgaggcaggtctttgccccagatgtgcttgctaaactgtaacgtgctcaagggcaagcatagtggtcagtgtgcactgagtatatacacagacgtttccactgctggtgctctcgaagctagttagagactgctagttagcctgccactgtgcaagacgtctaaaaatcttacagcatttcccctcactagtgttttttttatgctctggagaattacacatccaacacatcctagaccttcagtgttcaaactgaactgagttaaaacgatttatgagaattaaaacagcttgtgactttaaagactaaggaaaatcataaatgaaattgtagaacactcgccggcgcggtgactcacgcctgtaattccagcactttggcaggccgaggcgggtggatcacgaggtcaggagatcgagaccatcctaacacggtgaaaccccgtctctcctaaaaatacaaaaaattaatcaggcatggtggcaggtacctgtaatcccagctacttgggaggctgaggcaggagaatggcatgaacccaggaggcggagcttgcagtgagyggagatcgcgccactgcactccagcctgggcgacaaggcaagactctgtctcaaaaaaaaaaaaaaaattgtagaacactcaacatcgtgtacatgtatctttttcataccatacacatattggcaatatgcaaattaccttaaattctaactaatgaagtggataaaatttatatcaaagtttgcttttaaatcttgaaatagcgttgagtcagtgaaggcaaactccgttgcagtggcggagacgctggcttacaaagcacggaatttaaagctcatttctcgttctttctgcagcgtgttgctggcagtgactggcccccgaatggcactatttggcttctgcttttgaaatggtgctaaaaacaacattccttttctgtttctaaaaatttctgaggtacttttacagtccttctgaaatgtttgggaatctcatagttaagaatatgctcttgaaatagctcatttttgtcattcacggaatcagtggattgctgcacgatactgtttccctttgaggctgattgcattccaaagaaatactctcttttagcggccaggcacggtggttcacgcctgtaatcccagcactttgggaggctgaggckggtggatcacctgaggtcaggagttcgaggccagcctgcccaacatggcaaaaccccatctctactaaaaatgtaaaaattagccgggtgcagtggtaggagcctgtaatcccaggtactcgggaggctgaggcaggagaatcgcttgaatccgtgaggcagaggttgcagtgagccgagatcatgcctttgcactccagccgggcaacaagagcgaaactccatctcaaaaaaaaaagtttacctaataaattatcatctatggtactttcaaaggaataagtgcctgttttcttagtagggctgcaggtttcaatatgctaatgtctgtctctaaatatttaaacttctacgtggtttacttccttattgctttcaggtctccattcagaagtcaccaaattaaacaggccttgcctgatcactccgtgtagattactcttcccatcttccccacacttctcatcctttttaatctttcttcatgaaacgctgagtcacttgacataaattttgtgttcttcctcactgtttttcctttctcctcactggaaaatgaggtccgggggagtgagggtctttgtccctctcaccaccactttttttttttttttttttttttttagatggagtcttgctctgtcgccaggctgcagtgcagtggcacgatctcagctcactgcaacctccatctcctgggttcaagccattctcctccctcagccttccctgtagttggggctacaggcgcaccccaccacgtccagctaatttttgtatttttagtagagacagggtttcaccatgttggccaggatggtctccatctcttgacctcgtgatccacccgccctggcctcccaaagtgctgggattgtaggcgtgaggcgtgagccaccgcacccggcctcaccgccactttcctaaaacatcatctcacctttcacaggttggccacaagggttacctatgatagtcaatcagatatttgatttgtaaacgcactttatgaatattcatacagttggttttgttattgattgtattttagaatagggaagcttgctgtcttggggacaaattgaagatcagatgggtagtatgatcactttgggtcccagaagaaacaaagagcagactcactttttcctttaggacagttgggaagagagttgatgctgggtgggctgtattttctttgaagccgaagttaggtggggtaggttagagaaccgtggaacgtaagagtgcagtggtgtgatctcggctctctgcaacccccaactcctgggtccaagtgaccctcctgcctcagcttcctgagtagctgggactacaggtgcccaccaccacacccggctaatttttttattttttatttttgtggagacagggttttgccatgttacccaggctggtctcagactcttggtcccccaaagggctaggattccaggtgtgagccactgtgcctggtccaagtaacagttcttaaaagaaacaacagagaaaacacaggggaggaaatcatcagtgaagtcgttcaagaaaaaaattccctgtaaagaagcatagtaagaagtttccagattgaaaggacccacttgacttcccagtacaataacatcgacatgaaagtgactaactacaagcttccagaggaggaagacaggtcacatggcaaaaagatcaagaataagaatagctttggacttctcaacagcagcaccagaagtaagacaactaagcaatgccttacagtttcatagacaactggctttgggtctataattctatatacagctgaattaacaaccatgtgtgtgggtaagaaaaaaagactttgaccttcggacaggcaaggtccgaaaatgaaggaataaagaaagaggaaataataatatacaataaatgggataagggcctgctcttttcataacagaacttgtagtactactcgatcctttctctgcaactatgactttgatacatgctgaaacttaaaagtaagtggggaggtgggtccagtggctcatgcctgtaatcccagcactttgggacaccgaggcgggaggaggatcgcttgagcccgggagtctgagaccagcctgtgaaacatagtgagaccccacctctaccaaaagtttaaaacattagttggctgtggtagcatgcacctgtaatcccagctactcaggaggctgagatgcgaggagcacgtgagcttgggaggtagaggctacagtgagccatgatttcgccactgcactccaacctgtgcaacagagtgagatcttacatctcaaaaaataagtaagtttaggtgtaacagatggataaaagactgagaggtgggcatggagagtggtaaatctttcttctgtcttcccttggaaagagtttaagattcggagtcagaaaaatcaggctgggcgcggtagctcacgyctgtaatcccagcactttgggaggccaaggagggcagatcacttgatgtcaggaggttgagagcagcatggccaacgtggtgaaaccctgtctctactaaaaatataaaaattaccaggcctggtgatgtatgcctgtaatcccagctactcgggaggctgaggcacgaggatcacttgaacccaggaggcggaggttgcagtgagctgagatcgcgccattgcactccaccctgggcaacagagtgagactctctcaaaaaaaacaaaaaaraaaaaaaaaaaaagaaaaatctgatgaagaagggtggcctctaagtgcctagaacaggcatggcaggagcttggctgttgtggctgagggtgactaggactgctgtcacttccttcctggctaatccccgggcctccctgttcacatttccacctgcggcagttccctcacrtactgagacaggcagcgttgatggtagatgaattttttgccrtttaagtactttgactagtgtcctgtggacgaatgtttaattcagaaaaataattttagcctgaacaaatctcattatcttgcagggtgaacttctcacctgagggctgtaaagactcrtttgaaaatggagagccaagaaccaacggaatcttctcagaatggcaaacagtatatcatttcagaggaggtataacttgyttttcactttcccttccctcccccacataaatctgagtttagcagaaatatatagactgttgttacaatggtggtctttcattcttgaagacagttgtaaagatttttcctactcccttttttgggctcgggcacattttgctcttgtgtgggaggagtagtgtgtctctctgtgtattagtgaaattgagactctaggagatttgggctcttaacagaaaaattcttaatccttcctgtatttccctagatagaagaagaaagaatatatgcatttgcggactcagatatttcatatgtagttgtcacaacttggctgttkatggcctaacatgagtgtttaagaacaataaaaacctacgttgttaattgtagtctaaattccagtgaattctagaaccaatgtatgtctctgtgttattcaatttagctttaaaagtctcttcctgcaggaaccattgcagtggataaattttaaatccttcatcttggawctctgatcttgacacctttctggaattccttttggtttaaaatctttccatgttgtctgtgaacagatctgctgaaaatgattaggttgctgctggcaagaagtgaaagataggatagtaggagaaaggctactgctttataygcagtgacgctttcctctcagttcagtatagtgccgtaggtaagttagtctccaacaccagaactccccagtgtctaggcagaacgaacctggggtgtccatctgtggttgggtgggaaacccacgtgtcatgataggagatccaatcctggatggaccctgtttccccacagtccgccttcctgtgtcatcactgacaggaaaaataccagtgtctagaaatggccatttctacatatgaaactcacctgtgttgtatgcasccaggtcaggggacagaccatcaggagcgtcccaggacaccctcaccccatgtgctcccttccagttacctccatgccccaccccttcccccagcccccaggagtttttagactgtcatttcttttcacctgttaactactaccaccaagaaatttcaaaaagaagcagaagtgccctttaaaaaaacaaccctgaatacctacctactctgaactgaaaaacgtgcccacagattattgggaaggaaasatgattattgggagtctggggaaagacagaggaaatgtgaaagaaaaacccttttagataaaaacaacttggtttgaaagtttcccaacttattatctgatatccttttagttaatttcagaaggaaaatgggtcaagcttgaaaaaacaacgtacatggatcctactggtaaaactaggtaaactttttttttttcttacaaaatgttcgttatttgggttctcaggttatctgttgagtgttttgcataaactttgatgttttcttttttgtaaactctgttttaaataatctgatttagctgtttttccagtgttaggatgtttgcatcatttatagttgctgaataaaattgggttgtaaatgtgttacaataactaatcagaaaactattttaataccattctccctaagtagacaagtgtagacctaaaacttttgggccaaacctaatttaagctgataaggtgacagaataattaacagtacatgttgcttccttctagtaaaatctgtttttaatttctaaattagaagaaataaagagaaaacaacaacattgctaattttgaggtacgtgcctgcctcatggaaatgcaaattgggaaaaaaacattttgtacaccctatttcataatatgtgtcagtagccctaaagatactgtaccctttgaccgagtaatcccagttttaacaaagtgttaagggccaggtgtgttggctcacgcctgtaattccagcactttgggaggccaagggtgggggccggggcggggggcatcggttgaggtcaggagttcaagaccagcctaggcaacatggcgaaaccccatctctgctaaaaatacaaaaaatagctgggcctggtggccctgtaatcccagctacttgggaggctgaggcaggagaattgcttgaacccgggaggcggaagttgcagtgagctgagatcacaccacagcactccagcctgggtgacagagtgagactctgtctcaaaaaaacaaaaacaacaacaacaaaaagaaagtattaagtaaattagcattcagaattaaatttatgtatagaaaatgttcaccaaaattttaaaagaaaaactgaaagcaacctaaatatcttaaaaataggaaatgaattgttatagtgtattcccttggtaaaatctctgcagccgtctaaaaagcagattctgaagacaacctagcaatatgggaaaagctcctaagttgataacaaagtagaaaagtatgtatatgcttttcaaactctgccaaataacgtgtaagaaaaagccggaaggaaaattatagcaaaatgggaaaaaagctgtgtggttaaccttttttcttttactttccagatttttgcatagcaatcttttgatattataaactataagaagaaaatactatgaaaattaattttttacttagtgaaatttaaatggagtacaacagaatgaggatgaaatttagtaaccagatcacgtgataaaaattcatcagtatgaaaactccatttgcaaagtgatccaataagagtacatgatttctttgtgatgaaatagatcgtcaagatgcaaatacatgggcttgccagtcatctgaacaactgtgattatatctactaaactagcaaagcccttaataaggcctaatgtgggagagctgtaggaaacatgttaagagatagatagcactgctgaattaaaacccagcagtaagaaagctaagcacagtatgatccaccaaccatgaaagactgtaactcttcacttaagatgccaagtgagtttgatatggaaaactaaatgtacaaaataagtagggcccaaacccgatacagaaatgtggcaaggcccaagtcttagggagcaccatatgttcaaatgtatttatatttgtgaaactatagagaggttggaacccaatgtatagtgatacagtttggttctcttttgcctgtcaaattaagtttataacacaaaacatagccctcaactctaatgagtctaaacatgtgtttgaggccaagcgcagtggctcacgcctgtaatcccattactttgggaggccaaggtgggtggatcacttgaggtcaagagttcgagaccagcctggccaacattgtgaaaccccgtctctactaaaaatacaaaaattagcccagcgtggtggcatgcgcctgtaatcccagctaccccggaggctgagacaggagaattgcttgagcccgggaggaggtggttgcagtgagccgagactgcaccactgtactccagcctgggcgacagagcgagactccatctcaaaaaataaaaataaaataaaaagatgtgttcgcgccagctcatctcttcgcctgactggtcttctgcccttcctgcatttcctaatcagggatgtacatcagaatcatatggggacttttctgaaaatacgacgaaatctcacttcagaatatctatttcagtagattgggagtaggctctaaaatccaccaaactaccatatttatagcatggtcatgtccattcttccatacatagggtttttttcctggcctctgaagaggatttatgtaaagcactaatattttataccagaatgtcaccctttgaagaatgagtctttgtactttcctgtatgccacgatgtataatttataggatgtgttatctctgacctgatataaaagcctgcgtgtacaggttgagcagccctaatctgaaaatctgaaattcaaaatgctgcaaaatccaaaaccttttcattgccaacatgatgccccagctggagaattccacacctgactctgtgtgacaggctgtagtcagaacacaggcatacaacacagacattcagtgtccccccaggggaaaaggaaccctccccttcagctcagctatatccttcttttttttttttttttaccctgagacagagtcttgttctgttgcccaggctagagtgcaatggtgtggtctcagctcactgcaacctctacctccctggttctagcaattctatctcagccactcaagtagctgggactagaggtgcatgccactgggcctggctgatttttgtatttttagtagaggcagtgttgttggccaggatggtctgaaactcctgacctcaggtgatccacccaccttggcctcccaaagtgctaggactacagtcgtgagccaccgcatccggccatatcctttttttttaaatttatttaatttttatttttttagtagagacagagtctcactatgttgcccaggctggtctcgaacccctgaactcaagcagtcctcctaccttggcctcccaaagtgctggggtttcaggcgtgagccaccacacccggcccgatatatcctttgcacgcacacggcgacttccctctgcaggtactcccacagagggtcatgaaatggcatgtgtgcagaccggatgcccagcagcagttccccacaacaccctacacagggctgagacctatgtgcatgactcattgtggggttctttggcttatttcctgctctgtggggtaaagatactgttcaaaatgtcaaaaaggcctgcatgacacccagagggtaaggcaaatatttcaaaatctgaaaaaccaaactctgaaacacttccggcccctcgtttcgggtaaggaatactcaacctgtacagctgtcacttggtgtctgtcggggttggttccaggaccccctgcagataccaaaatccacagatgctgaagtccctgatatgaaaatgcagatactcagtatgtatttgcctctaacctatgcacatcctcccacgcacttcatctctagagtaatcacagcacctaatacaatgcaaatgctgtgtcaacagtcgtactctattgtttagggaataatggcaagaaaaagtgtggacctgttcagtatagatgcaatttttttcctaaatattttcaatgggtggttggttgaatccatgaatgcagaacccacggatatgaagggccgagtctaagagataaaatagcagctagagaatcctatgttccaccgtctcattcatgaaaggggatgtggggttaattttagaaatataaaaatattccagtagtgttgtgtctattgacattcaagacagtgccgaagtcaccctctgaccctcccgcctcttgtgttggtgaactagagggaggaaggccaacaggcttttccataacaaaggagactaggaataggatgatctcactggaagcagaatcctaaagctagaagaggttttggagaaaacatactcattcctgctttttacaaaggagggaagagcctcagggaggctggagctctgggcttagctggcgggcaagtagagacgaagagctgacttccagtcagctgtgcatctcacaggccctttgaagttgttggagctctcactgggcaatcttattccgagatttcttatcaatgcgtttctgttttattgctggtgatttatggctcrttactgcttgtttccttcaccttaaccacgataatgatgctcctctttttgtttcccttattcctagtgtttgggatgggaccttcagtgcttttcccagcactgtcttcttcagtctttaggactaaccttaggaggcagcagagagagctatgccaaaaggtgttcatctcttgcaatctgtatgatttacttaccagcattgcttgttggtcagctccttgctactaacaggaatgytgggctgctgtgagttgtcatagaagtctgtttgattttcctgtgttcattttgacatatttggccttcggaatttgggtacaatgctgaaagacctacaatttccagacagtctttttgttttgttttttaaaaagcaaattaaatatttgaacaattttaatgaaaatatgacaaggtccaaattttaaggacagccggataggaagcatgagcaggagggttccgaggaggatatcttgcagctcttactatcgagatgcaggtggtaactcctttttatcccaagccccagagccacccacatgtttcacttcctttaaaagagatcctaaaattgtttgcttctccactctggtctcttaccactgcttttttctgttgtagggagaagagagtgaagggagaatgttccttttatgcctcgcccctttaaactgcataattgtgtcagtaactgggtttcctgtacaactgtgccccatgttccaaggccagaaagtagaatagcacagatgttacccaaaagctgagttgggtaacagtcagaaaccaatagctaaccaggaataaagccatacaagagagcaggactgtgctgttactcagcccactttttctagataagatctcacacatgcaaagtagggcacttgcctacatttaataattcttccattaataaatgggaaggttctaccttcttaaattgtgtgttttaggtcacatattttaaaaatcaaaatgatatgaaaatctcaatagttcacgttgtccatagtagcttttgttcctagagacggggtgagtcttttcctatggcttcatttgcattacctgcttattaatctgtcactggctgtgctccttgcccagagacataggatccaaactaaagttttctgagaaagcggcagctcacatgcttagcaggctttctgtttcgggggcacccagaaggtgaggtgtagggtggcaagagttttcgttgttaattttcagaagctataggaaagcagaattagcttctttaatgcagacgtttattgctgtggycttcttgaccagtatcatgagtacatttgcatgcattgcatttaagaagttctggttgtacagagaaaacctaagaaaattctcttctgtagcactaatgacttttttttcttctctgcctgaacagaacttgggaatcagtgaaacgtacaaccaggaaagagcagactgcggatggtaggagtgcaaacctattccaaccctttagaaaggaagttagcacttgtgatcgtaagagggttttcaatggaaccaagttaacttctattaggatgttgtgtctttaaatctccgcttaggttttgccatactaygtaacgaaattaagctttctttataagtaacttctggcttctgttatctaagcccaaaacattgtttttgaggggaagttgttctaatgtttataactaaatgtaaatcaatatagtttgaagccacacctgtgtctagacgtgttatgacttctagaagtccttgtgtcctgttggaaggatctagatgagaggctttagtttggaaagttacttggcacaccttcatgcttatggaccacttgctttacaggttgatgaggacacggaattaattgggcaaagcctattccattcaccctcccctccaggcatgaatgccttgactgcaaagagcctacaaacaatcctgagaatcactctggtcgaggggaagttgggcactaggcttttcttatttttccatttagttttggtttccatttttgctggaagcaaacagtagctatgctgctgctgctggcttcacagataggaagctgtggggagccaggggaccctcctgggtgctttgtgttttctgaaacccagtcgtttttgtttttcttaggttttaatgaaggccaagtaacttgagaggaaaggtcttttaccctaaaactggaaaatcagtcttgctagcatttattgcagacagtggaacttacttgatttcttgctcaaagttgacccaggagcacagggatggctgtggcctcaccagtggtagggctgccacacgctggaaagtggttctgtggaaggtcagtgtagtcagaaaccttacatccttgaccctgtaggaaatgtttcgttttagttccgattttagtttaagaaactgtgacaattaaacagcctttttgtttaaaaaagaaagtgtaaacaacatggaagtgatgatttttaattacatttttaaaatagcttccaatattaactgccagtattgtagattaaaacggagtttcttaaagtctggggttttcattagcttgctctaaacaatgtgctggcattgctgacctctcattagggatttccttggttccatttcctggtgacaggtgtcgcggtcatccccgtgctgcagagaacacttcactatgagtgtatcgttctggtgaaacagttccgaccaccaatggggggctactgcatagagttccctgcaggtgagtcactcaacatcgaattgcttcttagggatgttggcctgaaccagggtaaagcctgagaactgcaaagctcagctctgcagtttttaatctgtccttgtggttttaagtaaaactaaaccatttcgtagcgaggctcctccaggcccccaggacaccccaacaaccctctgaacccgtgaaggcgacacaaggccacctcccacccatcccaacctcctcttggcaatgctgcctccagccttttttgtttgtttttgttttgttttgtgagacggagtctcgctctatcacccaggctggagtgcagtggcacgatctcggctcactgcaacctccgcctcctgggttcaagcaattctcctgcttcagcctcccgagtggctgggactacaggcgcccgccaccacgcccggctaattttttgtatttttagtagagacagggtttcaccgtgttggccaggatggtctcgatctcctgaccttgtgatctgcctgccttggcctcgcaaagtgctgggattacaggcgtgagcccttgcaccctgccgtctccagccttttgagtaattgcccttccccttctcagcttatttgattgtttgtcattagccatctgctaatggaaatttccaatgataagtaggccaggctttttttttttttgagatggagtctcattctgtcacccaggctggagtgcggtggcgtgatctcggctcactgcaacctccgcctcctgggttcaagcgattctcctgcctcagcctcctgagtagctgggattacaggcgtgtgtcaccacacgtggctaatatttgtattttttgtagagacagggtttcactgtgttgcccaggctgatctcaaactcctgacctcaggtgatccacccactttggccccccaaagtgttggaattacaggtgtgagccaccacgcccagcctaggccaggctcttaactccaagaaatgtgaatggagaagacggtttgctctgctgtgcggaaacaggccaaggagactcttcatttcaactagaatatttttcttgcacagtaattaaagctctccaaaatttattgccctatattattgtaggactttattggattgttcccatctaaagagattaaatctcatctatttgttattagtgrtatacgttttattattattatttgagacggagtcctgctctgttgcccaggctggagtgcagtggcacgatctcagctcactgcagcctccacctcccgggttcaagtgattctcctgcctcagcttcctgagtagctgggattataggcatgagccaccacacccggctaatttttgtatttttagtagagatgggctctcaccatgttcaccagattggtctcgaactcctgacctcargtgatccacccaccttggcctctcaaagtgctgggattacaggcctaaactaccacacccagccaaagttttatattttaaaaggctagctgctggtaacacatggttaacaactatgatttttctcatttcctcaccattttactgaaggctatttaattacctttttttttatttttttattttttgaaatagagttttgctcttgttgcccaggctggagtgcaatggcaggatctcagctcactgcaacctccgcctcccgggttcaagtgattctcctgcctcagcctcctgagtagctgggattacaggcatgtgccaccacacccggctaattttgtattctcagtagagacggggtttctccatgttggtcaggctggtctcggcctcccaaagtgctgggattacaggcgtgagccaccacgcctggccaggctatttaattacttttaatattaacgtgaataaattcttctctcactttttcttttttctttgagatggggtctctgttgctgaggctggtgtgctccggcaccatcacagcccattgcagcctcaacctccccaggctgaggtgatcctcccacctcattttttgtatttttttgtagagatggggttttgccatgttgcccaggctgatctctaactccttggctcaagtgatctgcccgccttagcttcccaaagtgctaagattacaggtgtgagccgccatgcccgggctctttttttgagactatgtctagctctgttgcccatgttggagtgcagtggcacaatcacagctcactgcagccttgaccttctgggctcaagtgatcctcctgccttggcttcctgggtagctgggtctgcaggcgtgcatcaccgcattcgatttttaaattttttgtagagatggggttttgctttgtcacccaggctggccccaaactcctggcctcaagtgatcctcctgcctcagcctcccaaagtgttgggattacaggcgtgagccaccacacccagcctgagtttttcattattttattttattttatttatttattttttgagatgcagtttcrcttttgttgcccaagctagagtgcagtggcacgatttcagctcactgcaacctccgcctaacagggtcaagcgattctcctgcctcagcctcccrcgtagctggaatacaggtgcgtaccaccacacctggctaattttttgtatttttagtggagacagggtttcaccatgttggccaggctggtctcgaacccctgacctcaggtgatctgcccgcctcggcctcccaaagtgctggggttacaggtgtgggccgccacgcccagccttattatattttttaattcctttcaggaaaaagagtctgcgttgctgctcccttcctcttccttggcctctctgttcactcctcacagtggccatgggagtcccctaatggccaccagtttgctcctttctggcctttcattcccaggcctcggtgttttactatgagggaggaagacaagacaggtgatgctgtcagcatcctacgtgtgaggaagcagaatatgagcaggcttcctgtgctgcagccacacagcaagctcccaagcctaagccagttggtcaccaccaagtcacatctcctcacagatgctgcccgtgctgtgcagagcagcgtggagatggtcgtgaaggctcatgatggatctgggtctgaataggacgactggatgatgccttcagaacctgattcatctgctcagagttttattctttcgcctttttgtttctataaaaattccaagctgggcacagtggctcatgcctgtaatcccagcactttgggaggctgaggcgggtgaatcacttgaggccaggagttcgaaagcagcctggccaacatggtgagactaaatacaaattagcctctactacaaatacaaaaattagccgagcatggtgstgtgtacctgtggtcccagatactcaggaggctgaggcaggagaatcgtttaaacccaggaggcagaggttgcagtgagccaagatcacaccactgcactccagcctgggcaacagtgtgagactcccatcttcaaaaaaaaaaaaaaaaagagttccaatcctcaggtttctctgtaagaccacttttcacagtgctccgattctcctaacgtagcgcagcagcaggtgtgttacaagaatgaggggttcagccgggcgcagtggctcacacctgtaatcccagcactttgggaggctgacgtgggtgratcatgagatcaagaattcaagaccagcctggctaagatggtgaaaccccatctctactaaaaatacaaaaaattagctgggcgtggtggcacgcgcctgtaatcccagctactctggaggctgaagcagagaattgcttaaacctggacgggcggaggttgcagtgggccragatcgcaccactgcactccagcctgggcgacagagtgagactccatctcaaaaaaaaaaaaggagggtttaaagaaccggatttcccgctcccatcacaccaatgatttggacttgcaggtctcatagatgatggtgaaaccccagaagcagctgctctccgggagcttgaagaagaaactggctacaaaggggacaytgccgaatgttctccaggttggtattgcttgaaaattcaccaagtgatggattcctccgtctgggaagggattgattatttgggtgttctttacgctcagaattcactgaagagaaagaaatcacagattaggactggtcaccaagtgtaagggaatctcccctcccaggaggaaactggagccagaagggcctgaagttgggggagaattaatgaaattaaattgccttttggctggatgtggtggctcatgcctgtaatcccagcactttgggaggccgaggcaggtggatcacctgaggtcaggagttcgagaccagcctgaccaacatggtgaaacccatctctactaaaaatacaaaaattagccgggtggcgcacacctgtgatcccagctactcgggaggctgaggcaggagaattgaacccaggaggcagaggttgcagtgagccaagatcacgccagtgcactccatcctgggcaataagagcaaagtgaaactctgtctcaaaaaatcaattgcctttaggaatttcctaccccctgagttttrttgctcacccatctcatgcatgtgctaccctcatcactggaagatttttttgagtttgatgtggtgaagggattttatgacttgacagtaccatctaaccccgcagacctagcaagcttgactcgagagctctggggagagtgtgagtgcccagatgctttgcagcctgcagatctgcctaccaaatgtgagaactagttttcccgcatcacctccacgtcaatgctgagctgcgggacgcatcttcttcctaagaccatagtgaaacaaatgccaaagggactgacgcatctgactgtcccttctctccacagcggtctgtatggacccaggcttgtcaaactgtactatacacatcgtgacagtcaccattaacggagatgatgccgaaaacgcaaggccgaagccaaagccaggtatgtgtgtgtcggctgtgatgaaggtggtgtggttgcattacgtgtcttggaacttgctgctagtttgatttattaaaagaatgtagtctttcatggaaagaatcggtctttcaaatagacttcatcagtattcttgtctctcttcctaatcatgtattttagcatttttcttttgccacttcattcatctttacgctttctttgtaaaaaaatgttaaatgacatatttccctgttttctatatgaagtgtattcccacttagtaatatgagctgcaggcttaagtagtaaacagtgagaaacttaaatcaccctggtttctgtcttcatgtatattttaagaatggcctaagttcccctgtagtcccagctgctctggaaggtgaggcaggaggatcacttaagcccaggagttggaggagctatgatggtgccactctgtgacagaatgagaccatgtctctcttaaaaaaaaaaaaatggcctaagtaattgttaacsggcagcagattattcactatttctctttgctctataatatttcttagcaactttggattcaaaagctgtgatgtctctgtcaattccgtgttgtctctcccatccttttaaagggggtatttatatgtgcaccacagtaaatcagtatcagtgatattctttaacttcttaccctcttcagttgttcatatttatgtttcagtatcccactgcaactaattttaagtcttattttttgccgggcgtggtggctcatgcctgtaatcccagcactttggaaggttgaggtgggtggatcacttgaggtcaggagctcgagatcagcctggccaacatggtgaaaccctgactctactaaaaatacaaaaattagccaggcatggtggtgcgcacctgtaatcccagctactcgggaagctgagacacaagaatcacttgaacccaggaggcggaggttgcagtgagtcaagatcacaccactgcactccagcccgggcaacagactgagaccctgtctccaaaaaataaataaataaataaataaataaataaataaataaataaataaataaaataaatcttaatttttgaactgcacatatacatatgagacactgtggaaaagtttggcagttcctcagcatattagatacagaattattatatgatctggcatttcatctcctaagtctacacccagaagaagtgaaacagggactcatatacttgcgtgcctgtgttcatggccgcctctgtggaaacaacccaggtgtctgccagcagatgaatgcatccacaaagtgtggtatacacacaaacacacatacacgctgaaacatgcgataacatgatgggcaaatactctgattctacgtatctgggtgcccagaatagacaaactgatagaggaagacagtagagtaagcgctactagggatggggaattagtgttgagtggatcccgagtttctgttgggtgtcatgaaaagttctggagatggatactggtggtggttgtgcacctttttgaatgttatttaatgctactgaattgtaccttcatagtggttaaaaggtaagtttttatatgttctgtatattttacataatacgcagattcatatctataaaaatatacatactatcgaatatgctttaaattttgctacttaacattatgtggagaacaataacttcatactgctcgagtttgacaatgtatataaattaagttagcagaaacccaggcttctgtgaaattctcaaagcctttttgacgcctcttgtataaaagtcttccgatgttaccactccaggccttgctgaaatgttttccttctgtttatttccaggggatggaggtatgttctgcaactcctggtggccgagcgygtatgacttagtgtagtggtgatggctgcagacattttgggttgttttggtaggctcttgacgttagctttgttttcacttgcactttgtctgtttagagtttgtggaagtcatttctttacccaagaatgacctgctgcagagacttgatggtaagcattctccagaccgccacccagtttctccagttctccccgtccccatcccagcaaactgggtactaaatataactccatttctttatcttttttgtatcactaaagtcaaatgcctagcaacttgtaaaactgcaggtgaccactactaattttcctttctgggtggcacagagtttgaaaataagagcaaagcattctgggtcaagtgcaaacttttggtagaggctttttctcctacagaatggcccagatgacattcctgctgagtagccaaaacgattctacactttaaaccttcagtccatagcaatgcaaaggtgtgggtagataagctgttagcttttcctcaagtatgctagtatgagggatggtcctttgtggaggctgtatgttcaaggagaaattgatgatgctccttcaacaaatacttgaggtatttcctgtatactccgtgtgatatgcttttcacataataaaccaaaccagctgtgtggcccttagaaatcactggtcatgtagatgcwttgtataattcttggccacccatcttttagagactttgtaaacagtaagcttatggggagaaaagtcctttgataaaaccacgagaggagatactgtatggagacatgaggagatactgtgtggagacgaggagatactgtatggagacataccatgggcccttcaaggagcacctctgtatgggctggcaaatccctttcactcatctagaaagmagcagacacttgtcatcatgggaatattttattgggtataagtgttttaggtaattgataactgatttttctactgtttttaagtgattacttcaaatgtgatttgaagcattgtttggcctgaagctttaagaccagtttcttaagcttttccctgagtttcagcagcttacggtttcagtgaataagcagagcgcctggttttgaawtgtctgttgtttgtttgaaaatctgaatgtgtctttcaaaggctgctgtgatttctttggataaaatcagatttcgtatcccttagagagcttccactcctgcttcacctttccaaaaactagacctaaggtagaagccacctcgacagctcaaagccagagttagaacartcatactgaatagatacaatagtttatctggtgcgtatttggagaaaggcatgacaatcaatacgaggcagcgcagctcggagtcacaggcccgactcggtttgaggctccgcggaccataattagctatcacatcaaacaggttctgtagcctctctcggcttttttcataaaacaggaacaataacagcccctccctctgaggaggtgcgtggaaagcagggtgacgtaggcaagtgtgaaatgccgtgcggggttatcttttagtagaagagtatcctttttgtaaaatgtcttccttctcccttccaccttcttaacttcacttttggtcttagaaaagggagaaaaaaatagaataagtgaggggaggtggagagagggctactatggctataaaggaggaggggtaaaagaaccaagttgcctagctttagcagaatcaaaatacagtaatcaaaccgtttattcaaccagcaacatttgagaagtcggaaggaaagtattacattttaagatcagtttgctggccgggtgcggtggctcacgcctgtaatcccagcactttgggaggccgaggtaggctgatcacttgaggtcaggagctccagaccagcctggccaacatagtaaaaccccatctctactaaaaatacaaamattagccaggcatggtggtacatgccggtagtcccagctactcaggaggctggggcaggagaatcgcttgaacccgggaggcgcaggttgcagtgagccaagatcgtggcactgcactgcagcctggcgacaaagtgagactccatctcaaaaacataaaaaaaaaattaaaaaaagatcagtttgctacaaagagtagcatctgccagttaccaagcacctgctgtgcccaggtgagtaggacatgcttcctgcctgcaaatgtccccaggyttgttcccaaacaagcggctaggaaaacaagaggctgattttacatctggcaacctccatctgagtgaaacaaattttaatgaaagcctgtggtaataaggtcctgagaccgcattcttggtagtagatctccagtcctaacatgcacacagtttaacttgccgggggaacatatgtatcccctagcagcagaaaagatggaatccctaagatcctacataatcatcaccatctggtttcagaaaagcaaagycctaccccagctataaatgaggtatagcgattggctctatacacttccaactttgctgttttmacacataaaatcatccctggctgggtgcggtagctcacgcctgtaatcccagcactttgggaggctgaggcgggtggatcacgaggtcaggagatcgaaaccatcctggccaacatggcaaaaaccccgtctctactaaaaatacaaaaattagctgggcgtggtrgcgtgcgcctatagtcccagctactggggaggctgaggcaggagaatcgcttaaacccaggaggcagaggttgcagtgagccgagatcacgccattgccctctagcttgggcaacagagcgagactgtctcaccaaaaaaaaaaaaaatcattatccctgatgttcttgtctcatgctaggaatgtaatcttgcctttatagtctttattctttaagatccttatagaccaaaaaaaacgttatcaccagcatctagcataggaagtgacatatagtagtacctgctgcgcaaacactgattgaataagatgttttgtccttccttaacggcatgatctaagttgttttctttgctttccacagctctggtagctgaagaacatctcacagtggacgccagggtctattcctacgctctagcrctgaaacatgcaaatgcaaagccatttgaagtgcccttcttgaaattttaagcccaaatatgacactggccatttttgtaaacgagaccaccaggccttcttcactaagactttgtattcaacttagtttaatgtagatttgccattagctttttcgtaaaataaaagcacagaacagatgtggtggtggtatggaattgtaattacaggtaggttgtgaccttcctttaaatttgttataactccagctaaaattaacaaagaatataaatgcaagtatgtttactccaatttttttaaagctcaacagcagttaactacagctcagttacttttctagtccagtctggtasacaggggtatttgtatagagaaatagacctgagttctcaattaggtcatttccactctcaacccccaatataaaattctaagctgggtatgcaaataaccatgtactccgttagtgtttaaaacagcgttaaaaagaaaaaaaaggctttttggcctcttctaattgaatttttactatgcaaaatttatctagggtagttgaatccaactagggtagggttcgatagaatcctctactagttttcagttcatctatttactgaggctgaaccagcttttaagtaaggaaaacggttgactccattcactacaccaaggctaggagactaatgaaaattcaggtccatcccgcaagcatctgcacgtgcttgaggatctcttttcctattcttacctcaaagagtacttgaagtttctgaaaacaaatctgtaagactgacatgtttggggcagtaatatcttgatgttaaaccatgaacagaaccagcaagatcagccagtacctgaaacccaatacagagtagttcacagcaagaagtacagattgatctggttcccatgcctgaaaccctgtcatctagcagttctaccagtgttcctgggccattttcttagcttcttgagtgagtttagctctttttgtgttgacttttagggcctccagcagctccatgattttccaggactttccagtctggcccccacggaattctcaggatgattctcatccagccctaagtcatgtttctagcctggctccagcgggtaagccaggccctgagaaccatatgaaagggctctccagataaaatcagagtgctaatgccagaatgctgcagtagcctccgtttgtccacaggctcactgtctgagcccaggatatttttatgagtgaaactgtaagatctttacactggacttcctaaagataaaacaattatggaaatacagaactttacagatgaagctgtctagccctatacatgtgaaaattaagatccaactacttcctgtaatggtagccttcccctatgcctctaacccttttttaaatcctgatttcaatcacaggcattgtgattctccaaagctctaactcttccttaggtctgaaagccacatgctatcaatcattgaaatcaagagagaaggcatccgtagacgggcgcagcccagtctttccacatagcccagttcctccccagccactccccatgggaatgacctctgcagctgacctaagcttatcctctccttcttcctaagagtgcaacttagaagtcagagccaaatcctagaatgtatccctaaatgccatttctattttttataaacatgaaaaggttgtgctttggaaattcagtctgtttgagaactggcagtctggctggcactgtttaaaaatgtttatttgccctgcatttaaaaactgaaggtttcctatgtattaaaagccatatttccaccttcttaagggaaaaaaaaatcggacgtcataacactgggtggatgtttttatggtaacagtggtctgaggcccttggcggatgctcaccgagccactgtcactatcctgcctgcctttatctgccttgccctgcgattatttggctttgtaagcataagctacgtaagacataccacacctaagaaactaaacagcaatgaaaacccatacttctgaaaagggtgtcttttaaaaattaagtttgatcttttgggaaataaagcacatagttttcaaaatgatttaccaagatctatgctctttcaaatggagactgggatattgttgttttgagaccactgttttcctgtttcctcccaaatgttagtcacatatatgattacccttaagttggtcactatctatctatctgtcaataatttaggattaaagtttgaagtgtaattacatttgacttttacaggcatctcagggtggacttcttatgaatacactgaacctatacaaatgatcttagaaaacgtttaatatcagatttctttattttttccaacacaactgaatcagttttcttaaataaaagtttattgtctactgtttacactcatgttgctgctgtgagtacaacaacagacacaaattcctagcatgaatatattcattgttcacccccactgaactacagacattgcttgagaattagatctttgctttagggatttaaacagaaaagaatcggggcccagaatcttgaaagaatattctcaagtgactggttggagttagaaggcatagccaatacaggcaaacagcacgatgatgctgtcactgggaagagaggaggaggagaaggaaaaggaggaagaggaagaggaggaggagaaggaggaggccttagaagcagttgtggcagaaataactggagacttgatttcgcccatgtgggctaagtggctgctttgagaagggacaaataaaaatgaggtgggggtggggagtggggataccatgagttaaaaaagtataaaaagtaattatctaaaatatagattagatataaatgttccagaactcattaaataagctcaaaaatactggaaagtggcaatttgaactacatttatttttcaacaagtgggggcaatatgaagtgttttgaatgttgtgtgcaaaacgaatccatctcaccgtctcactgtcatgatttaacacagcaaggtagatacactggtttccagcattacaggcaacactagatgtactttttttaatgaataatgtaaacttgagttttaaggcagcgggtactaatgctgcacacagacttagctcggtgcccatttcagaaacgggtcagtcagcactcgaaacaagaaactgtgaggggagaaaaggggagccaccagtgtcatctgacaaaaacgatccgtcaaagtgttttccctttcacacgcacaaaatgaaatatttgaacatttagaaaaacaaagcacccatcccaccaacttcggcctgttctttaacaaatatttcaaaatactggtaaataatagtgactgctagcagaattccagtgccagatccaatggcccccaggaagtcagccagcactgacagggcgccaatgcacaaaccgccaaacgcagctgcggtggggatgtacctaggagacagaaccccaagttaggcggcagcagagaccaggaacagcacggcagctagagacgaagacaggtagaggcgcagcagccatagctgggtctaaagcctccctgaactccagagggaacaggctgcagtgtggaggggtgtgcagggcacggcatgggaacaggagctctgatccaggcaaagactctgaccctaatttccaggaaccagtcaacagccaagaaagacaatatgtaatcttacaggacatgagattcctggacagatttaaatattaaaatgtttaagatttttaaatgagtaacctttcgttccctcttgtggaatgaagagtaggtatgaacaaatttatgtcataagattttgaggatccatttcagtaattcaacctttggctgcacattagaatcacctggaaaactgaaaaatgggatttaaaatactcaaaaaagattagaggcagtgataggtgaaacaagaacagcaagatggtgacaactggagctggagatccatcatactactctgcagtctgtgttctaaataaataaaaagtttaaggaaaaatactagtgccttttcaacaaatgatgctgggacaacaggatgcccccaagcaaaagaaggaatctggatcccaccaggcatggtggctcatgcctgtaatcccaacactttgggaggccaaggcgggtggatgattagatcagaagttcaagacgagcctggccaacatggggaaacccatctctactaaaaatacaaaaattagccgggcatggtggtgcgtgcctgtaatccctgctactagggaggctgagacaggagaatcgcttgatcccaggaggtcgaggttgcagtgagccaagacggtgccactgcactccagcctgggtgacaaagtgaggccccatctcagataaaaaaaaaaaaaaaaaaaaaaaaagctagctggccgtggtggcacacacctgtggtcccaagctactctggaggttgaggcggggaggatcgcttgagcccaagaggctgcggtgagctgtgattgtgccccacttcgcatccatcaggatggctgaaattaaaaagccagagctagtgctggcgaggacaggcagcagtggaacctcatacactgctggtgggaatgtggactacagcagccaacctggaagacagctgagcagcacaaaatttgtacaaatatgttcacaacagcattattcataaaaagtggaaacaacccagatttctatcaactgataaagtgtggtaaagccctacaattgaatattattcatgaaaagaattaaggatatgaactgtgaaaacatgatgccaagtgaaagaagccacttacaaaataacatacattatatgattccatttatatgaaatgtacagaataggcaaatctgtagagacaaagttaaaagtggctgtctggggctggtggttgggaaggtgggctagtaggtacagggtttctttctgggtggtgaaaatgtgtttaaacttatgactgtacaagtctgaatatactaaaaaacactgaacaatatacttcaagtgagtgaattacatggtatctgaattttatctcaataaagctgttaccaaaaaataaaaccctgatgcctggaactcaccccagaccaaataagccacagttcctgggaaatcctttttaaaagctctctggtgattgtatgtgcagccagccaatgctgagaacagcactgatctgcaagattttatcactgggatgagcagagcagtgctcacaatttcaatgaaaaattcaggtgttggttttgacatggaaaacaagttttgtgtgaaattttgattcatctgtgtgaatagaagggttttaaatatgaacttgaacaaagaaaaacatttagccaacactgaaagactgaaacacaaacacaggcctataaaggtgtcagtctagcagccttacctattaagctcatgaaccatagaggtatctcggtggcccctcattaccatctgctgttctttcagctgtttagctacctgccgagagaaaaacgactttcaaaatccaactggaacatttcactgcttacatctaccacgttctatgcgaagtgctcgccacacactaacacgtaacatacaataacctgaaagttgcattgtcatatcattcgcattaagcctgaggaaaccaaagcttcagtgctcctccgctccatgttacccatatgaaaccggtgcttctcaacccttcttcaattaccaaacaagattttgttttgcaggagggttgcaaaccactgtaatatctaagaattttttaccttttgggaaccaatttttagcctgttggggtgacactgactcattaaaaatgtataaattaaagcttaagttataaaggagtgtatccactactgttttgacaattaaatatgaattttccaaaaacaaagttttattttacttttttaaaaattttttatttatctatttatttatttattttggagacggagtctagctctgtcgccaggctggagttcagtggcacgatctcagctcactgcaacctccgactcccaggttcaagcgattctcctgcctcagcctcctgagtggctgggattacaggcatgcgctgccacgcccagctaatttttgtatttttagtagagaaagggttttaccatgctgaccaggatggtctcgatctcctacccatgggatctgcccacctcggcctcccgaagtgctgggattacaggcgtgaaccactgcgcctggccttttttatttttttgagacaggatctcgctctgtcacccaggctggagtgcagtggtgcaatcttggctcactgcaacctccacctcccggactcaagcgttactgctccgtctcaacttcccaagtagctgggaccacgggcttgcaccaccgtgcccggccgatttttatttgtatttttttagtcatga

SEQ ID NO: 94659 - DNA, 39904 bp, Homo sapiens
  misc_feature (1)...(39904): n = A,T,C or G
gttaaattggtcatttctagacattgattctacaagaagacctcagttaagtctcacaccatccattttatcacaaatcccatcacaaacagcttattgagaattccctgaacaaagctagatgcctggtcccaggcacacatgtaatgagattccttggaagcacccatttctaccttcattataatgaaattctcctgtatcaaggcctcatttcattttgtgactgtctttgccttgattccttgaatcttcttggcacaaaaaacctggtctgaaatcatgaatacatctctatgttcttgctttcttccagctatttcctctttttaggacagcctgctcggcttgcatgttgtttccagcaggtttctgatgtcttacttatcctaaatacacccgatccagccacacatgtttcaggagtccttttatgaccccctggataatgttggccaccctttcctgtgtgcccttcatttttattgcttctactatgcaggccaaagaacaacattagtaaaagtttagtctcaagtaataaggaacttctgcttattaagatatctaagtggtgttttgttatttttattgtgttctgcccaacctgtatttggccaaacattgataagatgaattgccttgtggacatgcccactttgagaggaactgagtgtggcttatggccatcagccagctagaaactgaggccttcactccagtaacccggaaggcactggattctgccagtcacccatgaccttggaagcaggtcattccccactgaggcttctgggagaccctgcttttggattatgccttcattgcagcccactgaggatccaagctgaggcactagctaagttctgcctgtctacacaaaaatcactacaacttttgcagcttgaagccaacaaaaggtgagactgcaaatggcaattataatacagcatggcacacaaggaaacaggacacatgcaatcctggaagatggggaagaaggagtgtcaggaaaggttttgcaatggcctctaagtggagtattcaagaattatatgaaagcgtatttcatgctgggcatgttggctcacgcctgtaatcccagcactttgggaagctgaggtcggtggatcacctgaggtcaggagttcaagactagcctatccaatatggtgaaaccccatctctactaaaaacaaaatacaaaaattagtgaaacaggagcatttctgttattgattttatagctgcgaaggaagcagagtcaggattagtgagcgatattcagaattatgcttaattggatgcttttatgtaagttctaagaaactactgggtggtgccaaggctgaaagatgtgctgagatcaacaggcttcccctgagtaaggtaaaggattttgttgttaaccacaaaacatgtttcttgtgtacactgagtatttcccagagactctcatgacctattgcttactatggaggaatcctttggttcagatgaaggaaagctttccatcaatgcaagcattgtgacaacgttgattgatggttattgcaacccagctgtccctcagaatgagtgtgttcactggaggaggtgacagtaccctcatcaaattaatgaaagtaaatgtctaggtttttagcaaaagcacgaactctgaaagaaagcatagcgtacattaaccagcttgccctgtagcccacttccatataactgcttactctttagagtcatgtaccctgtatcacaaggtcctaacctcataggtaacgtctcaaacagtaggaaatctcacgttttccactcaagatattttctgcatcatgccttataacagttccacagatgccatccaatctacaggcccctcygaggaactgactcagccccacaatgcagttaccacatccttaggctttcatagtccacaccctggccagtcagcaccccgccctgctcctcagccccctgcctgccaaaattcccttgaaaatcccagtctaaaactcctcggggcagtgaattcgaagtttcctcctacttcctcgtttgtctgccattcaattattaaaccccttttctgctgcaacagccactatttctgtgtgttgatcagttactgcacaatgggcacaaatatgcgggtcctatacagaagatccccctgtcaggtgtctatgagaaagctcctgtaaccccaaggagaaagtgaggcacggacagcgtcttcctcaacttccttccagaggatcgcactacacacccaacagcaggctctcagaagtcttaacatataaaaacgtagtagataggtaaatagacttgcagaaggataggttttcctcccctcaattcttaacatattcaccctcactcatgcacattctcatgtacagtttcccagttaccctccctaatcagatgctcttaccaaactgtgccctgtgtccggctgtgtgcagttgggggtgaagggaagggaggaaggaaagacaagagacttggccctgatggtcctcagtcgtggggagaccaatcttaggccatgcactattccttcattgccattgtcagggccatgtttgctacttctgggactgggttttattactttccttcaccttttctgctttgcatgggaaatgcagatacccatgtaggcacaaagggcattttctttcctctctcttctgaagttttgataattagagtgtataaaacaaactgacaagtgaaaggttaatataaaaagacatgcaaatgtgtatacccgtacatggacatcagattcctgcaaataagagactccagggcgttcctgttgacagagggtttcatcacatcctgaggctacggagagaacaggggtttggggtctctgggggaggtggagtctcaggtaatgggggagtggaagagacacatggtgagccaaggctgtccccacatagatgtgagcctctcaggggctccccaagctgctctcaggaaggcaggtggcggcctgtggagaagcttctcagtcagacctttaaagtgtcaggatcttagtctgtttttcctggaagttaatctttctttgatccaataaggcatataaaggggtcctcagagaaaggcttttaccctctgttcacttcactaatgtacatttcctcagcacttacaaatctctgcgagagaagaaagcttttcaggtctttctgtgtgtcggcagcctctctgaattgtgacccctctgaatagtcatataaaaatatgccagaaaagtacattttgagtagcacattttgctttccttcaccctgtgtaacacgtcttaaaaacaagagtgtaccatgaggtccacagccggtggccccactcctgcctcctgaacaaaagcttcaacaaaagggataatttaaaaatgagcagctctatttcatgggcctctttccaaccacctggcactaaagtaaaagaccggtgcaactcagaacaggtgcaatgatccaggctggtgattggcaggtctaaaatgccacccaagtcccctagtcactgtgagtcagcaagattttccagagaaggaggttggagataacactatcaaatcacttttagatgatcatgcctggtgaatgtgagtgccttaatgaggggtggggtagagcaggcatgtctgatacatgaaagcaaatgggcctgctccacacatcgctcagcaaacagccgtctcaagctgctcttctcttatttaataatgaggcagtcacttgcttcaacagaaaacattttcaactgactacattatcccataaagcaaaggtatacggttgaaatcatatatgttcttaacatttctggaccctcctatacctatgaataaatttaaatgacttgcttattccaaaatgaaattcctatgttatttagaaaacatgttgaggaaaatattggactggagagaaaaataactcacaaagagtcctgtactcttccggtgacctacttcrcatttggaagtttggttactttttatgccaatcaaaacatcctgccatgtaactatggagcatgttcagtaaaatcaaatgttttacccacacagaaaataaaaatgaactttaatgtttttgccttggtcttcaaaaatgcacccaaaggagaaacactgcatttcccaaacaggacaaagtgatttggtgccaatctcttaagaatgaagaatgaagtgtttagctagtttgagagtcaagaaaaactgagaaatgcagaactcaagtttccacttgaaaatcattgtaacaagtgacaggaggaaagaaaatcctgtagtcttggcatgacccatcatttttaagggatttttctataccatctctgtttattgattgtataaccctggatgccaagaaggtataaaatcccatgtccaggcatcaatacaggccctctgctctcaatgagagaaaaatacctaggacttgtggggatacaaggaatcctttgtccaagtgattagtctttggtctttaacactcagcctagtacattttgggttgggagaggggaaaaatggggaatattaacctcatcactaaactaacactaatattctttagtggaaaaaaggttatcctgtcgaaccagcaaaatggctagaggtttctgcagacattctagttcatccaaaagttttaattaattttaataatcttagtgaggtgctaaaagagggaccctaatgggatgtgagactcccaaactcaaagagattctagtttcatgaaaagcaaattctgtgacttcacaaactagatatttcattaaggtcacaatgtagccaagcaattctgggcatgactgtttaaaacaggaatgtgaaaccagagcaaaggcagccctcctttggctgggcgatggcatagcagaccaggaactttcccccacatggtgctctatacaggacaggggtgaatcagctcagctacaccatgtgccttagagactctgaacatgagacatgtggaaaaagaccctaaaaaacaattacaggcagaatgcaggaaaaacagccagatcaccaggcgtggtggctcataccaataattccagcattttgggaggctgagccaggaggatctcttcagctcagaccaacctggaacacaccacaagaacttgtctctgctaaaaggaaaaattttaaaaattagctgggtgtagtggcacctgtctgtagtctcagctacttgggaggctgaagtagaaggattgcttgaacccaggaggtcaacgctgcagggcactgtgattgcaccattgcacttaaatcttggcaaaattttttacagtggcaacacaggttatgggatggagagaagaacaagcctggctagcaaaggaggtttcattatttagatgaaatctcccaggaagcagccctcagagagaacagctgggaaatgtttttctttagacctttaaaggtatcagattctcagttaatctttcttctatccaagagagattctcagagaaagcccagctataacaatgcaaattttctctacagatgcaagtctttcccactaaagacagctttttggctcttctcgtatttcctgcccttctgaatagctgtcttgaaatgtgtcaaagaaatttattttagtgcaaaatgtattggttcccttgaagctcaactctgactccaagtaagacaagaggggatttataaccatagagcacggtgaggtcagaggagaaaaaattgctaagaggaagcaccagaggttagggtggcaacagcaaggcagaaattctggaataccaaacgatatggtttggttctgtgtccccaccgaaatatcatgtcaaattgtaattcccggtgttgaaggaggggcctagtgggaggagattgaatcatgagggctgactttccttttactcttctcataatagaattctcatgagatctggttgtttgaaagtgtgtagcacctccaccttctctctctctctccctctccctctcctgccagccaagtgaagacatgcttacttccccttcaccttccttcatgatggtaagtttcccgaggcctcccgtgccatgccttctgtacagcctgcagaactgtgagtcaattaaacctcttttctttgtaaattacccagtctcaggtagttctttatagcagtgggagaataaaataatacagaaaattggtactaaatagtgaagcattgatataaagatacctgaaaatgtcaaagcaaatttggaactggataggtagtaggtgtgattggaagagtttagagggctcagaagaagatggaaagatgaaggagggttttgacttcctagagacttgaatggttatgaagaaaatgctgatagggatatgaacaatgaagtccaggctgaggagttctcagatggagatgagaaacttattgggaactggagtaaaggtcactcttcctatgctttagcaaaaagattggcatcatcgtgttcctaccctagagatctgtgtcactttgagcttgagtgagatgatttagggtatctgatggaagaaatttctaagcatcaaagcaagcaagatgtggcctggctgcctctaacagcatattctcacgtgcatgcccaaagagattatctgaaactggaactcatatttaaaagggaagcagaagataaatgtttgaataacttgagcctggccatgtagcagaaaagaaaatattattttctgaggaagaattcaaggtggttgcagaaatttgcatgagtaaagaagagccaaatgttaatagccaagacaatagggaaaaatgcctccaaggtatttcagagaccttcaaggtaaccccttctatcacagacctggaggtttaggagagaaaaataatttcatgggccaagcccagggtcctactgctctgtgaagtcttgggacatggcaccctgcataccagccacttcagccccagccatggctaaaagggcctcagatacatcctgagctattgttttagaggatgctagccccaatgtgtggtgacttccatgtagttttaagcctgtgcctgctcagagactaagagatgaggcttgggggcctctgcctagatttcagagaatgtataaaaatgcatggacgtccaggcagaagcctgctgcaagggtggaacactcatggagaacttcttctagggcagtgtggagggggaatgtggggtttgagctcccacacaaaatttccactggggcactgcctagtggagctatgagaagagggccaccatcctccagaacccagaatggtatatccactgaaagctcatactgtgtgcctggaaaagctgcagacactcaatgccagccagtgaaagcagccatggggcctttaccctgtatagccacagaggtagagctgcccaagaccctgggagcccacctcttgcattagtgtggccttgatatgagacatggagtcaatagagattatttcggagctttgaaatttattgactgcctttctgggttttggacttttatggggcctgtagcccctttgtttgggccaatttctccattttggaacagaagcatttactcaataccccatttccattgtatctagaaagtaactaacctatttttgattttatgrctyatagttgraagggacttgccttgtctcagatgagactttagaattggacttttgagctaatgctgaaataagttaagactttgggggactgttaggaaggcataattatctttggaaatgtgaaaagaatgtgagatttggaaggggctggggcggagtgatatggtttggctctgtgtccccacccaaattacatgtgaaattctagttcccactgttggggaaggggcctggtgggaggtgattgaatcatggaggctgacttctctcttgctgttctcatcatatggttctcctgagatctagttgtttgaaagtgtgtagcacctccaccttctttctctctctctctctctcctgccagcaatgtgaatatatgcttgcttcccctttgccttcctccgtgattgtaagtttcctgaggcctccacagccatactttctgtacagcctgtggaactgtgagtcaattaaacctcttttctttgtaaattacccagtctcaggtagttctttagttctttatagcagtgtgagaatggactaatacacaagaatacagtcagagcaaagtttcactattctcacatttcctcggtactaatcaaatatgtccatgctctgctcttggccgtctatgggaaggtggggtttgcaacaccttacattgtctggsgacccagggctggaattgctccctcagtgaatcactgggggtgggattgacagagatagggggtccatatgcytaggaaagtggatgtaattgggctgtaccaatgaggagtctgtgttagggagggtagttctgtgtctacagaacacagagggaatttatgctactacaggtagaaattataagcccctggggacatccaatgtcagtcttcttttacctaatttgggacataactgtcaagtatgttttcctttatactggagaataatgttagaaatgatatctcctgcctatctacaaaactcctctataaaaatgtagaaaagaaagaaaataattttctcattcaaaaggcattaaaccacactgcaatgtgcaccataggtaatgtctaatgaaactacagggcactggagccttagaccctgccactttgttgacacctactgggcaaccaaaggaactagtacacaactgcctagtggttatagatcaagagtcttccaggcgaccagatctgaaggacacagccctccagggtggagactggatgctctttgtggacagaagcagcctagtcaccaacagaaggaggaatgctgtctaggctatagtgactctcttggaggtaatagctgcaagaactctcccaacagggacttctgtgcaaaaggctgagtaaattgcccttatgagagccttgcatctgtccaaaggtaagagaaccaatatctaaactgattccaaatattctttcatgatagcccatgcacacagagctatttgcaaggaaaggggcagataatactaaaattaaatatgcaaagccatgttggagctattggaggtattggcaaccccaagggaaacagctgttagacattgtccatgccatcagcacaggaattccaatctagctagagggaacgctttcactgactgcacagccaggcacccaaccaatagcagtgctgaggtccaggcacctttaattccccaaatagatctgacagctttcaaatcccagtatcctcttgaggataaaaaggctaccaaggacagaggatgtattcaagataagaaaggttgaaaastaaatgatgaaggcgtggtttggatgccracacaccttgttcaaccaatgccaaaatatacacatgatagcatgcatttcggatgagatgcctcattaactttcttgcaaaaatatataaaaggaaaaggcctgaaggctcacttggaaaggataacacaacagtgagacctttgtgctaaaaacgagcccagtaacsatagcagaggacagcctggacaataggagagaggttttgctttggaaaaataaatttctaaattgactggggcatgtctcagrtatttggggctcacaatacctaaataaattaaaagcagaaactaaaatagatatttttgaagcaatgttaktattctcaataaccttattcataataatyctattcacaataatcaaaaggtgaaaatgcaagtgagcatcagcaaatgaaaggataaacagagtttagtgtctacaaagggacattatttagttttaaaaaggaaggaaattcagatacgtgcaataatatggttgaaccttgaggacattttactaagccaaataaaccagacacaaaaggacaaatactgtataagtccaactatgtgaggtgcctagaataattaaatgcaaagacaggaagtagaatggtggttgccagaggatgaaataaagggaaatgggaagttgttgtttaatgagcagagttttaggttgggatgattaaaattgtaatatatgtatactggtgatgcttgctcaataaggttgatggacttaatgcyaataaactatatgttttaaaatggttaaatgatgaattgtatgttatacatattttaccacactaaagaaaaggtttaatgacaaataacaaagccaggatacatcgaagatctacacccatttccttctttcctaggccctggagaaatgcagagatgcaggtttaaccaggtccatcagggtgtccagtttcaatcactaactgctggaactgatcctcagacaagccaggactcaagtacaagcccayctacaaccagatgagcccttagggccactggggccatttctgactttgtgctcttcacatacttccttacattagaataatgtaattgttcagtatgttgtgctttaattttttaagaaaatgtcaaaggctagccatgacacggttatgtgtatttcttttaacttttccataaatattaaataatgtaattgttcagaaatagaatcagaatcgtttcataaatattagataaggtaatttttcagaattagaattaaataatgtaatttaggtctccaaaacttttttattttcaatatttttaacttttattttaagttcgggggtgcacatgcaggtttgttatataggtaaactcatgccatggtggtttgttctacaaattattttgttacccaggtatgaagcctagtactcattagttatttttcaaaatcttctcccttgtcccaattttgataaattggtagaggcaacagcctgaatagaggttcattcaagtgtaggaagagaagaattagatacagaagtgtagaaggtattcaaagaatgggttataaatacaccagacaattgagaagtccctgaagaaaacaatgaagtcaaatgacaattttctttgagatgacagaaaaaacagcatgcctatgtgctcttaggaagaatctagtagaaagagaaaaattgatgatgcaggagagagatgagaattgctgaatcacgtttgaattcatttcttatttctgcagtaaaaaattatcacaaatgttgtggcctgaagcaccataattaattttctcacagttctggagatcagaattccaaaatctcgttcaacaggctaaagtcagggtgtccacaaggttgtattttttcttgagggtctaggggaaaatgctattctgggccattccaggttccagagaatgtgttccttggctcatggcacttattctatcttgaaagccaactgcatggcatcttaggatctcttccctatgsgtctttccttacacrtcstctttgattgtggccctcctgggtgccacttgtaaggattttgagatgacattgccyatccagatgattcaggaaaygcttctatcttaggatccttaacataatcacatctgcaaagtttgttttgccaggtaaggtaacatagtcacagcttccaaagataaaggcatgagttattggcagggcagggggagggagcagtattgagcctactgtactagctttgtggagaacttgaagcaagtaagccttaattttctagccttgctaatagaaagtactatatcacyagccactaggtcctgaaaaatctagatttcatctcagatataatgaaataaaaacctgttccttagctctgatatcatttataccctatcatatgtccccttctagwyatagtccctttattcccttagtttaccmtttctcccaggatttgtgaatatcttttttcrctgtacatgyagagaactccagcattgctgttctttacattctcaacaactgaaagtttctactcatacytagattatacttcaggcaactacttccatgytataacttatacagacaaagaagtacttataactgctctatgaacctttaactttaacacacttcatactaatgaagcctcttacgcttcgattttcactacacatcagttcatcaagttcttgttcattaagggttgcagtcattgggtctctcgtgtttcctctttccattctttcaatccccacacaggtttacatattcagatttgcttacataataaagtaaattgaaatcctcagactacactcattctctctaaatttctcctttaggttttctgctgrttggggtctcttgtccttgtacctattgatctgtgcttatagcaaacaaactggatcaatgtgcktrcagccagatcaaattgccctgmttgtrtttttgtagaycatcttgccaaaagctaaaatcctacaccagagattcttattcattwgatctgtagwraagtytaggtatyactatgtttymtttattttatttttggatttgtataaaattaaagtttacaagtgcagtttgctacatagatayattgcacagtggtgaggtctgggcttttagtgtagctatcaccwgaataatgtccattgtayttacccaawaatttcccagcctcccagccttctgagtctccaccagtggragacagargatccagtgggcagataccaagtgcctgtaggtgtgcctaggcatrgagttgggaaacctctgctctttgatgaattttaaagaggttatttgggttttcttgttattgttgttgttgggttgagttccttataaattttggatatcagtgccctattagattcacaatttgcaattatttttcccaattgtgtaggtcatctgttctctgttgattttttttttttttgctttacagaagcttattggtctaattaagtcatatgcatctcttcctattctctcatttgtgtttttgaaatcttagtctgagttccttgctgagacctacttaggaattttttgccccaataagtttaccttagattttcttctagcacttgatagtctcaggtcttatatttaattaagactttgatttatttccagttgttttaaaagcttgcaaagctattttgaggtataagcaaggttgcacgtctaactttttgaaaatatcaatttttcattacggttttaggggttaggattgccttatcatcaacatgaattttgctataaaagctttgctaaggtcactcatgtttattcccttgcccttggcatgaactacagtgggaagagtgctgcaacccagccctagccaacgccgcatgagagggagtgtgccgagggcttctgagaaggtttctctcacatctagaaagaagcgcttaagatgtggcagcccctcttcttcaagtggctcttgtcctgttgccctgggagttctcaaattgctgcagcagcctccayccagcctgaggatgacatcaatacacagaggaagaagagtcaggaaaagatgagagaagttacagactctcctgggcgaccccgagagcttaccattcctcagacttcttcacatggtgctaacagatttgtatrtgwaatgagacagtttcctgattccccttgsaggacttgcgacaggggtgtggctcaccrgttcaaactgcttgagggagggggagcatggagatgggcaggtgcacaggccagggcgagcgctttgggctctggctccatggtagtgtctagtggtgggtgcctgcaaccacagtgttgtaaagctctttcagctttgccatctgcagayggcttgagtctgcrgctccatggaccctctgacttatctcaaaggcagagggccagtgtgacagctttctatatcccaagctcttgccaggcatcccagaagagtcagatcacatgtgggctcaaaggatgagggcaagattttattgagtggtggaggcagctctcagcaagatggatggggagccggaatgggggaatgagtaggaaggtgatctttccttggagtcaggctgcccagtggccggactcttctccaatcctcctaggccaaattcctttcagtgtccaatgtccctcctcttctctctttctgtgtgtcattgttctgccgtccatctggttgcctccttgtctcctcacctgctggtctgcccaggaacttaggctttgggggtttatataagggcagaatggaggtgtggtgggccaaaaggcaaattttggggacgtgaaaacagaaatgcctgttctcatttaggggcacgrstatccaggcytraaggtgggggcctttgctgggaaaccaccctcttctacccagtatttccctgtctcctgtccatatcacatggagtttaaaccattcagaaatagktttttctcacctggttttatgctaaccaaaacaactataatattaataattttctctttacaacctcccctgcttgttgacctatctaggagtggtcgcaaggtgtgcaagctgctgagtcaccctgactgcatcaaccccaggagcttgaggggtgaacaatagtattgagcaatagtaaaataacaaayagtgcagacaaggcagacgtctcaaaaagtgctcggtgcaattgtcactcatccagagtcaacattggtgacacagttgtttcttcaaacagagttcactctgaaaaaactgagcaaggtggaatttactttaaatttcatgggttgtgaaatttcaactaatgtcataattaaaacttcctacatattgctttaggcatctctgtcttttccccaaaattttctccatggcatcagcagtacctcagcctcctccacagcctcccagctcttcctttttcctcctgcacggcttttggcatcccaccattttccacagcaatgcaggctaactgtgagcttccacagcctctcacagacatgacttcacccacaaacctctgtgaggctcaagtgtacccctttttgttcacatagaacctcttcaccccagagaattgagtcaaccaaacaggaaatctcaggacaaacagtgctggcaaacatcattttgtttaaagtatcatatcaatatgtatttgttgagaaaatattcggagttctttgcaaactgtaacacttgttcagaaaaaatagtgagaagaaattaggatcatttatttacttgaggcacatgagtgttctttatgtatgactcaaggacatcccacttctgtcctccctgatcttccatcttccatctgctttcctccctcttcccatctccctttcctcatattcctctccctctccctcacctrtaggactgagaatccctgtggtcctctgagatcagtttctttccaccacattgtaaacaagctgtggaaagttttagttcttagcgactccacgacccacactagtcaggcagaagcccccatgtacaaggtaccccttgagccttggcaaggtgcatgacacacacttggtcactggaggaaatgatgagtagagagtgacaagcagaggaggggagctttgggcctgagtcctctggggcacaagagtggttgaggcttggcacttgccacctagatttcagacaatgtgtcaggaatcctggatgcccagaaagaaacctgctcagggtctggagccccaacataaagcttttatttaggcaatgttgagcactaatatgtggttggagctctgcagggggtctccatgggtgcactgtgtagcaaagctgtgggagaaaggccttacccctcaaaattccagaattataaatctatcagccgcttgcaacttcagcctggaaaagccatgggcattaaactccaaactgtgagagcagccatgtgggctgcaccctgcaaagccacaggtacagtgcttcccaaagcccccagaagcctacccctgtcaccagtgtgcccagaatgaagaatatagagtcaaggaagwtgattttgcagctttaagatttaatttctgccctgtcagctttatgacttgcatgaagcctcttcctcttctctttaagctgacatttcccttttgaaatgagattgttcaaccactgcctataaaaccattgtaatttggaaggaaataacttgtttttgattttacaggctcatagccggtagaaatttttcttggatctcagataaatctttgcattttagacatttaagttgattctaaacctgataaggctttagagactcttgaggtaaactgattggattttgtatgtaagaaagacctgaaatttatgtctgcagctttttctcctttatatcctcaactaacaatatttgggggtttctatgattctttgctaaaatytggattcccgtttcaatttctcttgtgcataatctgtaattattttctctgtagttaccattggaatgacatactgcatcctatagttataccatccactctgaaatcaatgtgamtttaacttcagttccatacagaaacttcttttccacagctamgtttctgcttcacattattgatgtcactaattacaactttatatatggtgtacatgttaacagaaagttattcttattgtaatgtaaatcttgaagaaaatgaragtaaaagcaaatttcacaaatacatgtttccacgtttttcatacacctacctttacgagaggtctttatacctctatatgacttcacgttgctgtctaaacttctttcatttcaaagtgaatgactctcttaagcatttcttgtagagcagttctaatggcaatgaactcctgcagcttctacatcacatagtcttactaactttstaatttttaagaaataatttggctgggtgcagtggytaatgcctgtaatcccagcacactgggaggccaaggtgggcggatcacaaggtcaagaaatagagaccatcctggctaccatrgtgaaaccctgtctctactaaaaatacaaaaatcagctgggcatggttgtgcacgcctrtagtcccagctactcaggaggctgaggcaggagaattgcttgaaccgggagaaagagattgcagtgagctgrgatgtaccactgcactccagcctggtgacagagcaaaactccgaaaaaaaaaaaaagaggctgaaataatttttttgccaaatatggwttcggtgaaatttttttttattgatcacattaaatatatcacctactatatcctccaaagactctcataagaaatctgtggatcaccttgtccaggatcccttgtaccccatgagtcatgtttatcttcgtactttttatttttgttgttgtttttttcagatggagtttaagcccaagctggagtgcgatggtgcaatcccaactcactgcaacctctgcctcccaggttcaagctattttcctggcttagcctccggagtagctggaattacagatgtgcgcccccatgaccagctaaktttttctatttttagtagaaatagggtttcaccatgttagccaggctggtctcgaactcctgacctcaggtgatccgcctgcctcggctcccaaaatctcttgttatttaaagattatctctttgtctggcttttagagttggatgataacacatataggtctgagtctctttgactttatgctatatgcagttctttaagttacttgaatttgtagatttttgtctttaaccaatttgaaaaatttkratgattttattctccaaataatttctctrctaccatgggtttgcacttccccttctgggaatccaatactatcatactggttggcttgaaggtgtcccataagtcccttaggacctgttcacatttctttattcttgcttcatgtccttagactcaggaatttcaagtgtgctatccctatgtgtattgattatatcttcatcctgctcaaatttgctattgaaacactctctggtgagtttttcattcaggtatattttttagctccaatttgtttccttttctttttataatttctgtattaatactatattgtgattttcttattttttcagattttctgtagttcttaatccatatttttcattagcaattttagcayatttaagacagctgtttaaatgcttctctactaattctaatgcctgtgattcttcaggaatgatttctactgatttatttcttcctcataatggactgtgatttcttgtttctttgtatgccttgtcattttatttttttgagctggagtcttgctctgtcaccagaatggagtgcagtggtgccatctcggctcactgcaacctctgcctcctgggttcaagcgattcctctgctttagcctaccgagtagctgggactacaggtgctcaccaccacgtccatctattttttttttggattttagtagagacggggtttcaccatgttggccaggatggtttccatctcctaacctcgtgatctgctcaccttggcctcccaaagtgctgggattacaggtgtgaaccaccgtgcctggcctgtatgccttgttattttatttaactgggcatttgaaaaaataaacatcttttttactgtatatagatttgttctatgtcatgacagtcattaacttatatgtgyggcaggttctcagtcaaggcatcagccctacgtaaaactcaagtccttcttagtttgtttctgaacatgtacctatgtggactgtgtttgcccttttatatttccccaaataaccaatggcttttgaattgcttactattatgaaattttgcatcccagtttctcctcaatagcttagatggactattgcatgtctcttcccctggccttttgcctataacatctgtatgtgtatagtcaccctgaatctctactgagccactccagaaataaataagtttatttcagtcaattttaggtattttctgatgtttccatgagttatatgggaatcttagaatccaccatcttgttgaaattactctgtgaaaaatttcaatatctttataatattacatttatgtcaatgataacaatttacctatttttcaatttctgtttgttttatgaaaaagcaaatagaagcaatcagggcactgcaagttgtgactactccaagatgtgaatcatggatcatgcaaattacaatcatgttttaacctgacctccaaagggagaataaagtaaaaattatcccatgtgaggattattcaccagtttatatgtcattagttaccagtttttctttatgaataatgtttagcaatattataaagtatatctaatagttatcaggtttttggcttgttactttttggtagtaacttataaaactgactggaaaagaccaataaggcactgtttgcatgttacaaattatatccaaagaccaaaagctgttaataagaaatcttccaataaaaccacatcatattttcttttttatttacacccacatcaggattacaactttatcaggactgcaccttgatcaggaaggsmtgtttctcttacaaggctaataagaaaggaacaataaatttgctgatgaaaaaaagtcatgyatttaaaaattttaactttaatttttaattgagggcaatattttaaagaaatgctcattagtcattcctttaaattgtgtgtgtgagagagagaaaatgaaatagtcattcaatgctgcagatgcagaggactcatcatcatgrcacamcaaaagagctgtgcrctagagttctrtatctatgtaagtcacaatttgttctacaaatctctttgagtaatttatgtctcatatatagagatctggaatagcaaaaatacttcagaggaaattaatgagtgtatcatgaccacataataatttacttatgaattttcttaggtaagaaacggttgaactggatgcaatttttatcacagcttgtgtaagactgcctctgtccctcctctcacatgccattggttaaccagcagacagtgtgctcaggggcgttgcagctcattgctcttatagcctgtgagggcacggaagaaacatttgctaaccaggccagtgacagaaatggattcgaaataycagtgtgtgaagctgaatgatggtcacttcatgcctgtcctgggatttggcacctatgcgcctgcagaggtaacaattaatattttagtgttgagrgttcaaaggagctagagtaagtggaagctgaccaggttgtcaggcttgtgttccatgttactctgcatgactccctttaaacgtcagtctttgtctgcaatgccgtcttgtcacagggtcatctactgctattgtgcactgtttgtcttctgtatgttatttcacagcttgtcagagtctataaaactcagcagaaagaacacggcttgcctgctccctctcttgaagattgattgtaatgggagtggtttctctgtttctttgtatagtcgaacagatatttacktcttccaagaagatacaattcagaggaatttttatggcaaaagttagtggagacaggtggatgaaatctgtkaggagagtatcactgttctgatgggcggccgtttgagccacccacactgtaatactagacctgcctaaagagaattttcccatgtactattctcacctctgggaaaattaccctgaatataaatatgtccctcattttaagaaaaaaaaaactagaaccaaacaaggaaagtttaaattctttgtctttgttaatatgggtcagatttgtatcaaaatattgkaacagaaaaatttcttgkttctctgacaagaaaattaatggaatatattttattttctagatttagaaatagctaaatgctatttctacactggaagaaaacttgtatctcaagactgtcttgggaatacaatgtgtgtgaataggaactagttatataaaatttgagtctcacatttctcatctataagacataaggagttacaaagggacattttgaagaccattgacaggagtggtttattttgtaatataaattggcatggagaggaagtaaagatgaggataccactgaagctccggccttggtaagcctttgattgcttgcacagcgaagagaagatcaaagatggtatgaggagagggctgtgagacccggtatctagttccttgtaatttcacaggaaaaagcctctgraatactttcaaggtgggaagatagtttgctttgtttctgtttttgtcatttaaaagatatactgtcaaatctgtatccaaatttgttacataagtcaataattgtaaattttactgcaatcatatgtttcctgacagagttgccttgaatttatggagctgaaccccattttgctaatcacttactccctgcagcctatttcttasatacacaaatcaatatccttagagtatacatctttacwcctagtatktggttstgttatgcagacagaatggccaaaacctgggtagaaaagatctaacataatagactgctatccatagatgtgcctatttccaatataaacctgctggcatctgagaaagtggagttctccctgtttcctaactgataagaatggtggctctasstaactgtttgtgtaaactgtggggtttctgtgcacctgctttgcttttggagactggaagatttgtgtctgctaggcagagtgagtcaatgtatccagtcccagacaaaatcttagcaatggagtatgtagagggcatctcttgtagacaacagttcacatacattgacaaaatatgatgctggataaagtcagtgcgctctgtgcaacatggtgggagaggaatcacaggagcttacactgcattccttcataattccttccatgtggctatttccttgtgttaatttcaccatactaaaaataattaagattatgtctgtaactatagttgcgtcctgttgatttttccaaaaaatcactgaaagtgaaattrttttggggacacttccaagctagtggtcaagcagtgatttttctgggactgcagaagttcctgctatgcccaacctttattactaaatgggaaagacccagtcagactgggatgggcttatgattctacatacagagctcatccaagaaaggaggaaaagctgatttttgtgaacgttgctgcttgtgcccgaactaactctcaggcacattagtcagaaaatattacgtttggttgctccccsaggttcctaaaagtaaagctytagaggccgtcaaattggcaatwgaagcyggstwccrccatattgattctgcwcatgtttacaataatgaggagcaggttggactggccatccgaagcaagattgcagatggcagtgtgaagagagaagacatattctacacttcaaaggtactgtgcctatgatgagcttgtgtgcacatgtatttattgtgattgtgtggaggtggcagttctatgactggatccatagttgagggtgaattgtgcttatttattwcgatttattcacacttactcatgtattaaaactaatatcaaaggcaggaagtgaagatggctttctcatctttgcagtgttccaattcatgccttcaaagtgcctttactcttygagctcagcacagatcaatatggtttaacatagactatagaatgagagataatcttaatcatattatgttatctgttacctcctgggtgagtttcttacatttgttatgattytgagtttccattgtcattttgatcagagagagagagaaagcgatataagagagctcagtgagtataaaagagtgatacctacattgttttaaattgcatccagcccaagttaacatattaaaaactgtgtttgcctcctcagtttccaaaccacaaagatacttagtcttgcccattgggctgaatagatgaaataattacaccactaatatgagttgtaaaacttaccaaagataattcagataatgggtatgcttatgatttgataacaacttttaccttttgagtaatttcactctttcattcaatatatgtactaactatatatccaacatattataaagttcatcatgatatggcagaacaaaaggcatcacaagaagagagagaataattttgcctgtggtcattagttttgaagtagtagaaaatgtctaaatattaggtggagcaaactagtaaaactggctcaagttttcattacacaacttcgtttctctaacctctgcagctttggagcaattcccatcgaccagagttggtccgaccagccttggaaaggtcactgaaaaatcttcaattggaytatgttgacctctatcttattcattttccagtgtctgtaaaggtaggcagcttgtgtgatcaaattaatttcacttttgttctcagcataaatattgttttcatggagatttgaactaarctttttcttaggaggacatagggattttaacatggaagaagagccctaaacataactcctaattcctttctatggaacagaaagcaattttgaatccatacttccgtgattgcatgtctacaagaaaagagagtgcagaatcctcaaagcctctgcctcaaaaacttgaggaaatgacaatcatctccttgaaggcacaaggtcttatttatgattcctgatttcacctcttgggatgttcacagacacagagtttcatgaagctgtggtgtccagaaaacctgctgcacatagggtgcacaatgagtttccatcttcttgcctcttttcaaggggcaagaactcagtccgggaatgtcttaaactacaaaccttcatgggaaaccttgttgcttctgcttcctctcttttcacactggasgtttyatttttgcttagccatgaattcttgtgtcattcataacttttgtcttaaggtactgaaaactagtcaggctagttaatgcaaaagggtatattagatatgataatgggaaatcaaagccagggctacattaagaatttgataaaaactctaaaaatatatcctttctccacccttatctctgctttattacaaaaggctttttaaatatttgttccaacctttttcgttggtggcatttatggctttggagcactgtcaggcccatgttcattaccgtgagctcctgtgcatctcctaatttccaaactagcctkgaaaacrcctccattgaccatgattggttcatggtcctgtgcayggaacatcayatgttcagggagataaagaactctgatagtggcacctgggtaaaaagtacaatccattatatctggatatcaagatcttttgcagttgaagagaggtattgccacagagaaaattataggagcagaagaaagtcaatgaaagtcaatgatgacactccattaggaaccagaaagatggtatttatttayacatataataggtgtaagagattagaggaagcctgtcacctgaagacattccttataccttcatatgtagtacactttgtacataccactctctggagcgctgcatcacctacctcatggaggattagtgtccttaaatgtacctcagagcatggctatgtgtggagaaattgacttgtgacatcactaaactgactgcttctacttcagccaggtgaggaagtgatcccaaaagatgaaaatggaaaaatactatttgacacagtggatctctgtgccacatgggaggtgagtgtttggaggtgagagaacggataagaaagatgaggtaggatacatctgtttcctatcttcttagtacaagtatggaaaatgcaccattggatcaaaaacttaggaactttacaaaggtagtttttgtgagcagcgaggaaaaagaaatgacaggcatacaaaagagagaagtggwggagaagaattgggggtaaggaggactgggatttctttccttgcctgtacattaatctctccactttcctaaggaggaaacagaaattctcactcttgcaatcactatcttcttccccaatttttctgttttattttctcccttttaagaaccacggctagctagtttgattgtcacrtctagacagttgttgctttcacagttctatgttacatttatcttgctcttcagtcgactacacaaatgatacctcacaattcctttttcccaggccatggagaagtgtaaagatgcaggattggccaagtccatcggggtgtccaacttcaaccrcaggctgctggagatgatcctcaacragccagggctcaagtacragcctgtctgcaaccaggtgagcgccctcagcctcctctcctttctgttcttcatgcccctctttctgtcctattgccaagtatccattcatttagwcccacttatctttgtaaaagagaagattctagagaacaaagcctcttcctagaagggcatggagkcctcttacttgtaccctgcttagaaaagtcttacraaaaggtgttgtaactttgatgctgaattgtgtgttacatttataggaggtcaattcgatcaagaagtccaaggattgccaattagactcagggaaaggtggacttacccctaagctaygaaagatgaccagagagtggacgggtgaaggtgatttggagggaactgtgcatagatatgaagccrtgaagagatgraatgaacagtacataaggagagagtgagagcaagagaagagaaatactagggattcacatgggcttcggatgtctcagtgyctcttgrtrtctctgctttcacacttcttgaccaagggcatagatacactaaaaattatctgcagacagtgaaggtcatccatggtagaaagagaaaatgacctgtttatggagatatctgttcacagtggatgaaatccacactgrggaaggttcagcagaacatggagctgacctatgactgccccgctcctagtcggctgctttttggagtctgtcatgcaatcagctgcttaaacacatctattctatgcatggttctytcatagcctagagataattccatcttttccttgagtcctgactggtgattccaggcctccttgatcaaattgactgcccccaaatgttacacayatttcagcattaaaatcactacacctttcccagtaacttacattttttgttataattttgttataatttggtataatgatatggtgctgtgataatttaataaaagcattgagaaattaatgtggttttaatactagtagttccccaattttttaatatggccattttcacactttccaaaaatttgataaaaataatactggagacccatgttaccatttatattcaaaattactaacattttgcaatgttatatggagtatatctgcataaatacatataatgtttctagaacctcttcaaggtaaattgtaaagatgacaattgacccctagagacctctcaaagcatgtcacaggaatgaagatattctcccagttccagtgtcattactgtatctaagaacatcatttatagtgcccttatgtcatttggtatycggtccatattttaatttttcattgcttaatcaaaatatcttttgtarctcttctttttttaaccagaattcaattgtttttatattgttgtatttgatatcagttaacttgtttttcccagttgaaggttcctgtaaattaaaagttagatgtgagtattttattacattggcttaaaactttggggcaagaaaatgtttttatcatgctgtgtttttcaaattgcacsacactagactgcatacaatcacagaatgccccactagtggtgaaggtagttttaaaaacttggttaagctamcagtggtcagatctgttgtttttaactcatgttttctctttaacaattactagtaatctgctgggggataattctcaacagaagaagtcatattcccatgacaaattttcacatatgattgagtatacatcagtgatttgaacttttttctactgcatttctgttttcttctttgttatttcttatttgttatttccttggggtttttacataatcatttacaattttaaccacttgtttaactattcttacctgacatttaattaaaaataatttctcaccaagtaaaaataataaactactattcctctaagtgagagtaaaggtaaacttcttccttcaattagcaatgtactgtgaacgtaattactgtaatgaccaccatcagagtagacaaagattgttgttctttttctcattgtcgcactaattgctacagactcacggattcttgtgttatgatttttaatttattttactcattttttaatgctcacatctactcagcatatatatatatattatatatatataatatatatgaaagaagaatgtgatcaaagactcatgagggcaagtgtaaaagacaaaagcacttgtttcatagggaacccactggtgacatttgagatatcaacatacaaatccatcatacaaaaaggaaaagtaatgaaagactgtgaaaattatcagtatttatgtgtatatgtatattttctagttcatctatatagatatatatcatagatggcatatatgatatatatatgtcagatcaattagaaaacatacatatatatgtatgcatttttggtattaattaggaaactagttcttttgtctttcagacctgccctcatgagtctttgaccaaattcttgatttctggcacgatttgatgcccaaggctcaaagaatcttacctcatcccagctctgaaattggccgtgtctccttctagtggtcggagttattgagaaaccaggatagggttcatggagttgcttgtgctcagaaatagcatttctattttcttaggagagaggggcataaaatttatttttatgaaaaagatcatttttgacaataatattctcagttcaaatttaatgctctacattattcagcttcttttactttggtgattttaatattaatgtaacttttggattatctgatgcttttccatcttgctcgtctgcaggtggaatgtcatccttacttcaaccagagaaaactgctggatttctgcaagtcaaaagacattgttctggttgcctatagtgctctgggatcccatcgagaagaaccatggtaataagagatacaggaagtttacctaaaacactggtttgataaaaaaaatttaatcagatcatgctgtttcctggagttcactcacagctgacttggggtgagggaagaatttgcatttctgacgagatcccaggtgatgttgaggctgctgttcgggggcctcgcttgagaagctccggtgcagagtggacgccttagtctgtttagggagccgcctaacaaactatccccagcctcagggcctcagcctttctgcctttccttccagggtggacccgaactccccggtgctcttggaggacccagtcctttgtgccttggcaaaaaagcacaagcgaaccccagccctgattgccctgcgctaccagctgcagcgtggggttgtggtcctggccaagagctacaatgagcagcgcatcagacagaacgtgcaggtgaggagcggggctgtgggcctcaggtctcctgcacagtgtccttcacacgtgtgcttcttgtaaggctctcaggacagccttgggccagctccatttccctgtatttcctatgcatgaactctttgtgtacgtcataagggtttcttctactctagcacaggagaggcaacagaggtggagagtaataggatgggatcaaaactacagatttgggttagcgttaagtcagtgatatccatatccctctgctggggccatgtccttttctttattttttataatgaagcattgattagatgttctttagtctccaactcatggcggatttttcttcttgtatgtttatgtagtataaattccttatatttattctcttagaattttatctttgcgaagtgcttgtttaactctgccttttttttttggcgaggtggttgtgtgtctttatttttatgtgtaggagaccatatttataccaataccttaggatataagacaaacccacttaatatagaggcttaatgcaaaagcatttattgagctcaaggttccatggttagaaaattagcctgggctcagcctaaactcagtccattccttctgttcctggctgggctctcatgtgtgttcagggcagtgaggcagctctgcttcaggatgtccctggggcatctgtgtgagygcccccctctcccatgcagttctttatcctccagccatccagcccagggttcacctcagcacagggcatgaccccagcatagtgaatggacatgtgcaaagcctttttaggtctaggctcagagacaccaaccattgcttctgggaaattctatcacctaatgcaagttacaggacaggtcagactcaaggggtggggaaacacacaccacctcttactggaaggaactggaaattcatatagccaagcaagtggacacagggacatrtgattgttagagggcatgttcctaattaatctatcatttatatgatatgtgtgaaataatatatcaatagttatatgtatgaatatgaatatatataaattgatatattatttcatatattctcaagaattcatacaagtctctaaagaattaacatccagaatacatacatatgtgtatgttttctaattagktagatacataaaatatacatcaygtatgatatatattataaaacctatgtcatatatatgacatatatcatgtatatgtatatacgtcactatttactaaaacattaagtaaaataagtgaagaaatccataggatactctgaaatagtgatacagagaacgagagaataaaaaatgacaataatgaaacaattgatgaatctaggtaatggcattcattaaattattttaaaaatatttttggacattagagaattcacaaaannnnnnnnnnnnnnnnnnnnnnnnnnnnnnnnnnnnnnnnnnnnnnnnnnnnnnnnnnnnnnnnnnnnnnnnnnnnnnnnnnnnnnnnnnnnnnnnnnnnnnnnnnnnnnnnnnnnnnnnnnnnnnnnnnnnnnnnnnnnnnnnnnnnnnnnnnnnnnnnnnnnnnnnnnnnnnnnnnnnnnnnnnnnnnnnnnnnnnnnnnnnnnnnnnnnnnnnnnnnnnnnnnnnnnnnnnnnnnnnnnnnnnnnnnnnnnnnnnnnnnnnnnnnnnnnnnnnnnnnnnnnnnnnnnnnnnnnnnnnnnnnnnnnnnnnnnnnnnnnnnnnnnnnnnnnnnnnnnnnnnnnnnnnnnnnnnnnnnnnnnnnnnnnnnnnnnnnnnnnnnnnnnnnnnnnnnnnnnnnnnnnnnnnnnnnnnnnnnnnnnnnnnnnnnnnnnnnnnnnnnnnnnnnnnnnnnnnnnnnnnnnnnnnnnnnnnnnnnnnnnnnnnnnnnnnnnnnnnnnnnnnnnnnnnnnnnnnnnnnnnnnnnnnnnnnnnnnnnnnnnnnnnnnnnnnnnnnnnnnnnnnnnnnnnnnnnnnnnnnnnnnnnnnnnnnnnnnnnnnnnnnnnnnnnnnnnnnnnnnnnnnnnnnnnnnnnnnnnnnnnnnnnnnnnnnnnnnnnnnnnnnnnnnnnnnnnnnnnnnnnnnnnnnnnnnnnnnnnnnnnnnnnnnnnnnnnnnnnnnnnnnnnnnnnnnnnnnnnnnnnnnnnnnnnnnnnnnnnnnnnnnnnnnnnnnnnnnnnnnnnnnnnnnnnnnnnnnnnnnnnnnnnnnnnnnnnnnnnnnnnnnnnnnnnnnnnnnnnnnnnnnnnnnnnnnnnnnnnnnnnnnnnnnnnnnnnnnnnnnnnnnnnnnnnnnnnnnnnnnnnnnnnnnnnnnnnnnnnnnnnnnnnnnnnnnnnnnnnnnnnnnnnnnnnnnnnnnnnnnnnnnnnnnnnnnnnnnnnnnnnnnnnnnnnnnnnnnnnnnnnnnnnnnnnnnnnnnnnnnnnnnnnnnnnnnnnnnnnnnnnnnnnnnnnnnnnnnnnnnnnnnnnnnnnnnnnnnnnnnnnnnnnnnnnnnnnnnnnnnnnnnnnnnnnnnnnnnnnnnnnnnnnnnnnnnnnnnnnnnnnnnnnnnnnnnnnnnnnnnnnnnnnnnnnnnnnnnnnnnnnnnnnnnnnnnnnnnnnnnnnnnnnnnnnnnnnnnnnnnnnnnnnnnnnnnnnnnnnnnnnnnnnnnnnnnnnnnnnnnnnnnnnnnnnnnnnnnnnnnnnnnnnnnnnnnnnnnnnnnnnnnnnnnnnnnnnnnnnnnnnnnnnnnnnnnnnnnnnnnnnnnnnnnnnnnnnnnnnnnnnnnnnnnnnnnnnnnnnnnnnnnnnnnnnnnnnnnnnnnnnnnnnnnnnnnnnnnnnnnnnnnnnnnnnnnnnnnnnnnnnnnnnnnnnnnnnnnnnnnnnnnnnnnnnnnnnnnnnnnnnnnnnnnnnnnnnnnnnnnnnnnnnnnnnnnnnnnnnnnnnnnnnnnnnnnnnnnnnnnnnnnnnnnnnnnnnnnnnnnnnnnnnnnnnnnnnnnnnnnnnnnnnnnnnnnnnnnnnnnnnnnnnnnnnnnnnnnnnnnnnnnnnnnnnnnnnnnnnnnnnnnnnnnnnnnnnnnnnnnnnnnnnnnnnnnnnnnnnnnnnnnnnnnnnnnnnnnnnnnnnnnnnnnnnnnnnnnnnnnnnnnnnnnnnnnnnnnnnnnnnnnnnnnnnnnnnnnnnnnnnnnnnnnnnnnnnnnnnnnnnnnnnnnnnnnnnnnnnnnnnnnnnnnnnnnnnnnnnnnnnnnnnnnnnnnnnnnnnnnnnnnnnnnnnnnnnnnnnnnnnnnnnnnnnnnnnnnnnnnnnnnnnnnnnnnnnnnnnnnnnnnnnnnnnnnnnnnnnnnnnnnnnnnnnnnnnnnnnnnnnnnnnnnnnnnnnnnnnnnnnnnnnnnnnnnnnnnnnnnnnnnnnnnnnnnnnnnnnnnnnnnnnnnnnnnnnnnnnnnnnnnnnnnnnnnnnnnnnnnnnnnnnnnnnnnnnnnnnnnnnnnnnnnnnnnnnnnnnnnnnnnnnnnnnnnnnnnnnnnnnnnnnnnnnnnnnnnnnnnnnnnnnnnnnnnnnnnnnnnnnnnnnnnnnnnnnnnnnnnnnnnnnnnnnnnnnnnnnnnnnnnnnnnnnnnnnnnnnnnnnnnnnnnnnnnnnnnnnnnnnnnnnnnnnnnnnnnnnnnnnnnnnnnnnnnnnnnnnnnnnnnnnnnnnnnnnnnnnnnnnnnnnnnnnnnnnnnnnnnnnnnnnnnnnnnnnnnnnnnnnnnnnnnnnnnnnnnnnnnnnnnnnnnnnnnnnnnnnnnnnnnnnnnnnnnnnnnnnnnnnnnnnnnnnnnnnnnnnnnnnnnnnnnnnnnnnnnnnnnnnnnnnnnnnnnnnnnnnnnnnnnnnnnnnnnnnnnnnnnnnnnnnnnnnnnnnnnnnnnnnnnnnnnnnnnnnnnnnnnnnnnnnnnnnnnnnnnnnnnnnnnnnnnnnnnnnnnnnnnnnnnnnnnnnnnnnnnnnnnnnnnnnnnnnnnnnnnnnnnnnnnnnnnnnnnnnnnnnnnnnnnnnnnnnnnnnnnnnnnnnnnnnnnnnnnnnnnnnnnnnnnnnnnnnnnnnnnnnnnnnnnnnnnnnnnnnnnnnnnnnnnnnnnnnnnnnnnnnnnnnnnnnnnnnnnnnnnnnnnnnnnnnnnnnnnnnnnnnnnnnnnnnnnnnnnnnnnnnnnnnnnnnnnnnnnnnnnnnnnnnnnnnnnnnnnnnnnnnnnnnnnnnnnnnnnnnnnnnnnnnnnnnnnnnnnnatcactagtgttattttgtagaactcaaatatggtctggagtaaaccacttgcgagcttccaagtgtttgctctcggtgtaatcacaaaggataggctcaattccgtaattaacaagttataactgtatatgtgagcagtcatttatctgtgtctttacattttggattatgtctacctataaaatggtttatgcattgtagctctttgaatattgggccctataacataaacaataatttacgtttctaatctaaccaagtgtgttgcgtatgataggcaggtagyaagtaatatgtaaagtaataaaataaagtacaattactaccagtataattatcacactcaaaattgtttattagtgatgagcatatatcttccttattcctcttcaatgtaaggcagaaggagttcctgtttttagtgagaatttgaaatagaaaaggtcagaatatctctttgttgacagatgtgggatctgttgttgagagatgtagagaaacatgtttgaacatttcactttgtgtgttttatgtgttaagttccaggcagggkaatagaattaaattattctttattttgaaaatacagatatgataaagtcacgttcattaaacaaagaaacacagattctagagcagtcagaaaatgaacttcttaacatctacactagcggcagcttcctagaaatcaytgcgctacggrctagtaacggagtcattgccattcagagtgtgcatttttttttctctttccagttttgctggcccccctaattatccattttctgatgaatattaacatggagggcattgcatgaggtctgccagaaggccctgcrtgtggatggtgacacagaggatggctctatgctggtgactggacacatcgcctctggttaaatctctcctgcttggygayttcagyaagctacagcwaagcccatcggccrgaaargaaagacaataattttgtttttcattttgaaaaaattaaatgctctctcctaaagattcttcacctactttggtctccataacttctatgttttctctccttctgacacactagtgcccccaaattgtgatttgcctatacgtttagggccggggttggaagatgttaacaaccatttaagattcatttctgcagtgggagtgggtggagtttcaccctctgggaaaggggcaggtgacaggtatttatcagtcagtgcctctctagctcttgtaggaagaagcacacgcaggatggagtctagaggatgagcgatattgaccagcaattcatgggctccctccagcagtgcgagggtcagagtttctggagccttgggaggaggcatccctgtgaggggggggttagggagatgggagggcaccaggaaaagtgattagaagtcaggtatgggaaggctaaataggacagagtcgagtacatctctgcttggaaaaacatatcaacacccttttttttgatcattatatcttgttcataaaagaaaactttccacattgttttaacaaaccccacagctgagagtcaggcctgaatctttgatgtgtgcccattcacaacgttgaccctattggtttgtggtggggcaggacatcgaagatatcattgactcatcacattcccctgaatagctcatatttagaaaatattcttagattgtaaaaatgtactgttcatttgttatatgcaatcttttaaatgttttatactttaaacaaggcatagttacaagtataaaacataaatatcccaaagccattatgcatggcactcaagattaaaatgggaaataatacatctaataaatcaaatgttccaagacttcaaatgtcttttggaaacaggctatgtaaaacagcacactggtttcaaactttggtaaattttaagaagaactcttacaaaggcatttaattcttatacataattttcaggggaactaatcaaatcagctaatcatgaagacatgattttcgttttagaaaacacttttgaaaacttgggataatctcatgccttaatgatcaaagcattatgagaaggacagtggttttttacctgggcacactttctaacacatttactctccactattcgtactctggtagccatgttaaccccatcagagattccttctcaagccatgtctcagagctgataggcatcccagcaagttttgcagctcacaatttttctgtaaattacttattctataaaattggaagaggccataaactttggagggccctagaccaattttttggattatttctggtctactctcattccgttgatgatcttagatattctctgcattaaatatcacctctaggctgagaaatccaccaaaaaatatttctagctcagcgttttcctccaaatcttcaatggaagatcataatgtgaactctgcatctccatgttaaagtttaatggacattcacacttagcatgtctcaaagaaatctcatgtaaaccatggccatcctgttctaccttaactttctgagtctatggaatgataatttcacatctcataaacttgactgatgtaagtgtcaagaaaagattgacattttgttaaaacttcgtagccaagtgtgtaacgcttaagcagactttcatatttcaaatctctatagcacgtgtaactcttttttcaagatgtgaaataatcattaggtcagtcatttgtaaatagtacggctgctgtgggctttttccagttcttcaccatccatttttataaaactcttatnnnnnnnnnnnnnnnnnnnntagaaagctataaacctggtaggaaaacattgaaaaatggcacaagtgactccttccctgtcaccaatgacagtcatgtgttgcataatgcctgggctatcttctgagaatggctttgttaggcaactgtgtcatggtggggacatgatagcattagagagaattctctcaaacactgtcatggccttatcaactatgcttctgtaatattctgaatccttcgctgcctttccaacagtgtttacaacggtttcctaagaaatgaaatccatttcaccaaaccacttttcttgctcatccataagaaacacttctcctttgttaaaattacatcatgagactgcaagcattcagtaacttgcaagctccaatttgaattctagttgtcttgctatttccaccacatctgcaattactttctccactgaaatcttgcattcctccaagtcatccaggagggttgaattcacttctttcaaactcctgttcaagtaaatgttttgccctcctgtcacgaatcatgaatggttttaatggcatctagaatagtaaatctttttcagaagattttcaattttcttttcacagattcttcagaccaatcactatggtagccatatatttatgaaatgtatttcctgaaccataaaacaagaacatcaaaattactctatgacccatgggaaacagaatgcacgttgtattagcaggcacggaaacagcagtaatctgtttcagcctctctataagaaagctatcggatgattaggtacattgccaaaaggcagtcctgttgggaaaaagccccccaaaatctggccataaactggccccaaaacttgccataaacaaaatctctgcagcactgtgacatgttcatgatggccataacgcccacactggaaggtcgtgggtttaggggaatgagggcaaggaacacctggtccactcagggcagaaaactgcttaaaggcattcttaagccacaaacaatagcatgagtgatctgtgccttaaggacatgctcctactgcagttaactagcccaacctattcctttaattcggcccatcccttcatttcccataaggatacttttagttaatttaatatctatagaaacaatgctaatgactggcttgctgttaataaatatgtcggtaaatctctgttcagggctctcggctctgaaggctgtgagacccctaatttcccacttcacacctctatatttctgtgtgtgtgtctttaattcctctagcgccgctgggttagcatctccccgaccgagctggtcccggcatagtcctattttcaaaaaattgtttttcttttgctgagcaggacttcttaacagtggtcttaaaatattcagtaaaccattatttaaggagatgtgacttaaatatctaggatttcttgctttatttatagaacacttgcattgtagatgtagcttaaatcttaagggccctaggattgttggaatagtaaatgaacatcatacttaggaatatagatagccagggaggggaaagatctctacaagaaaaatttaaaaactactcaaagaaatcagagataacacaattgacaaaacaagtacaggggcagcaaaaggtaacagatgccaactatgagatctcatcaagaactaagaaaatggacaaaagtaccagatagcagatgggaggcagtgttagcatgcctctcccactttgaaggacagattagtatgtagagatttacattgtgaattttttttcaagaactgatgcaggaacttaacacaaaaaccaaaaaaagaataaaaatccacatacactttgaagaagaagcgggcaccagcctactccatgaaacaagcaaaaaacgtcacagccccacattgtgaggggagatagtccactccagagcacacatccccactgggaatctggaaattcaggccacaagataaggctttaatcctatgcagagtgggaatggatttagtgagccagtgaaatatacaaatagaagcagcaggagtgtgaactcagggaagccattcctgactacatgtcacagggacccttggcgaagtcagctaatgagctcagagagggatcacagggtaaaagaagctcccaactgaattttgtgatataatctcaagtgaggacatgtgcccttgagcagaacccacaggggagagctggaagtgcattgcagacatgagcgcagaagctgggtgtccagccttgtgggcagaccaggaaggacgtggcctgaaagccatggttattctctctgtgggaaagctgatgacctggagcttgtctgagttctgtgcacagattgcttggatgtaaacctggcactgttagcagagcattacaggaatgaaaggaatgaaaactgccttgccaactccatgcgtgctgggtgaagctcgctgccacccattacttcccactccctttgtgaactcttctgtgcagcagaggcagttaaactctcctctggaacattaccccagcagcctgagaaccaccccttagccctcacaggggctgcagcctgcctcatccaaggacagttagagtgcagacccacctaaccctagacccactggtggtacccatccacccatcctggtagcttaacacaaagatacacttttaggagcttcataccccccctttccccattgcctgagaaaccactttccctgggcaacttagggcaagctcaaatcccactgctaccaccacagctggtgctcttttgcaagtgccacctcctagctggagaccaaccaacacagtccacacagcacctcaaggaatacatagaactgttcccaggaaggagaaaatgcctgcatgagctcagctattaccactgcgtatcacatcctggccaatcagaggtcttgagtcggtccgcatgacaagttcaccgctcacataaccagtgttcaagaaagccagcacactgagcctacctacatccaaggcatctccgagtctacgttgctccccgctacctcaatcagagctggtgctggtgtccactgctgggagacttgacgacaggtcacatcactggatcctttgcaaacaaatccagcaccagcctggagtctgggagcccactgggcggctaggcccagaagagcagtagcaatcactgtagtccagctctctcgaagtcccattttgagggtagggaaaagagtaccacataagggaacaccagtgggacagaaaaacctgaatggcagcccttgaatcccaggtctttccactgttgggaaatttcttgcagcagacaaacaactgcagagctgggtgcagtaggaaaagcctgcccctctgccccaacaggcaggcagcttctgtgactgagaaaggtcctggagaagcagtccttgttccccgctggtgcaccactgtagacacagctggggcttatcccacaggagcgcagagtggatgcacctatagagagccttcctggaacaattcatgatgattgcacccccacaggagaagcactctccaggtgaatgccatcagcctcctctcctttcttggtcctggccaagagctacaatgagcagcgtatcagagagaacgtgcaggtgaggagcggggctgtgggcctcagggctcctgcatagtgtccttcaaacatgtgcttcttgtaaggttctgaggacacccttgggccatctccttttccctggcatattctatgcacaaatgctttgtgttcatcataagggttttccactttaccacaggaaagacagcatgggtggagagaattaggatgggacccaaacaagagatttgggtttcagcattgagttgacaatttaccttgtatccctctgccagggacatctccttttcttcattttcataaacaaggagtttaattaggtgttctttagtctccaaatcattgtgaatttctttcttttccatatatactcacgtagtatatacttcttatatttattctcttagagttttatctttgtgaagcgcttgttaactctctgactcttttattgggttgtttgtcctgtttttatgcataggagatcatgattatactaatactttgggatataaagcaaaccctcttgacctacaggctttaatacgaagccatttatttaactcatattccatgtttagaaaattggcctgggctccgcctgaatgttgcccag

SEQ ID NO: 94660 - DNA, 25569 bp, Homo sapiens
  misc_feature (1)...(25569): n = A,T,C or G
cagattttcagcgaattggctttcagcaaattgatcctttggcaaagtggtcattaggcaaatgggtcatttggcgaagaggtcatttagtaaattggctttcaacgacttgccctctgagatttctctagagtgagtgttttcttgggttcaatgtgcacttcatttccataatgaatactcactggcggctagatgggaaacttcccggggaaccaggagctgccagaacagcctcttaataatcaggcaattaaaaaccctctggtttcttaacaggagggaggtacacagggcatctgctctgcaaggcacagtgatcaggctcagcattgtcacaggagctcttgcggttctgtttgttgcttgtgtgacatacacagccattcgttggaaaaaggactgagtggtctttgggtctcccgtaggtgatcatcatatgtcgtgataacccatgacaactccttgccacatgccacgggaggtccagcacccgaagaacccagcagccagggccggcttcatgggcttgcaacctggacagtcccacagggacacagaagagtccccactgtggtttaataatctgccatcaccatcttggaattctttattttttaacaagggtggccagggatagtggctcatacctgtaatcctaacactttgggaggccaaggcaggcagatggcttgagcccaaggagtttgaaaccagcctgggccacatagcaagaccccatctctacagaaaatacaaaaattagccaagcatgtagtcccagctacttggaggctgagatgggaaaattacctgagccccgggaggtcaaggctgcaggagctgagattgtaccactgcactccagccaggacgacacagcgggatcttgtctaaaaaaataaccacaagaccgggcacggtggctcatgcctgtaatcccagcactttgggaggctgaggcaggcggatcacttgagatcaggattttgagaccagcccggccaacatggtgaaaccccatctctactaaaaatataaaaattagctggacaaggtggcgcatgcctgtaatcccagctactcaggaagctgaggcaggagaatagcttgaacctgggaggaggaggttgcagagagcccaggtcgcgccattgtactccggcctggggcacaagagtgaaactccatctccaaaaaaaaaaaaaaaaaaccacaacaacaacgagggccccgcatgtggctgaaaacaacagaaatgtattgtctcacaggcctggatgctagaagcccaaaatcaaggtgccgcccgggcttcgcttcctctgaaacatgtaagagagaatacttccttgcctattctggcttctggtggccgctggcaatgcttggtgttccttgtagatgcatcgctccaatctctcctccctcatcacatggctgccttctccttgtgtctctgtcttcacctgacattctcctctattattttatttttttgagatggagtttccctctgtcacccaggctgaagtgcagtggcacaatcttggctcactgcaacctccgcctcctaggttccggtgattcttccacctcagcctcccgagtagctgggattacaggcacccgccaccactcagtgctaattttgtgttgttagtagagatggagtttcaccatgttggccaggctggtctcaaactcctgacctcaagtgatccgcccacctcaccctcccaaggtgtgctgagattacaggcatgagccaccatgcctggccctcattctctccttttataaggacaccaatcattgcatctgcctcctcaccagcagcccccaatccagtatgactcatcattacttaattacatctacaaataccctatttccaaataaggtcacattcctgggtacggaggattaagatttccaattttttccctgactcaattttttttaagtcagagcctcatcctatcacccaggctggagtacagttatgtgattataactcacagcctcaaactcctgggctcaagggataccctgacctcagccttccaagtggctgagactacaggcgcacaccaccatgcccaactaatttttttttttttgtacagattaggtctcactctgttgaccaggctggtctcctgacctcaagtgatcctcttgccttggccttccaaagcactgagattacaggcattatcccgtgcctggccctctttctacacctcaatcattgtatcattagcctgagctgcccatattccttattctgcccatccatgaccaatctcctcctttaacataacttccatctcgatatcatggggcctgctgggcactgcaaacagcctaaggaaagtggaaattttacttaaccttaaattctattacaatgtccacattgaacataatttatatttgaactataaaattttctataagttgaaacatgacttataaaggtctctacaccctgaagcaacgttttagaaagaaatcaattggtgcttttctgcagaaaccattaaccataggagagataaaggaaaaacttcaatgtactgattgaacttccatgcccatagcttaatttctaaaaggcaaccattccatactgttaaactgacttaggttgttattgctgttattaaagagaccctcaaagctagaagttgaaccttgactgtagttcttgcacgtacacgcacactcttgcaactgaaaccactcagattgtcctaatgctgttccccatagcaacaccacctggaattttacgtttgattttaagcatcagtcctaatcttcacttgcacccgaacacactgcacctgtgagagccacgtgacattaaaaaaatcccttcagtgaggccgggcatggtggctcacgcctgtaatcccagccctttgggaggccaaggcagatggatcgtgaggtcaagagattgagacactcctggccaacatggtgaaaccctgtctctactaaaaatacaaaaattagctgggcgtggtgatgcgtgcctgtagttccagctactcgggaggttgaggcaggagaatcgcttgagcccgggaggcagaagttgcaggagccgagatcacaccactgcactccagcctggcaacagagggagactgtctgaaacaaataaatcccttcagtgccttgatccttccagattcagatccaagatagatgacatttgtccctcatccgagttcaaacaccaagataaagatttcttctggccgggcgcggtggttcacgcctgtaatcccagcactttgggaggcagaggcgggcggatcacctgaggtcaggaatttgagaccagcctggccaacgtgttcaaaccctgtctccactaaaaatacaaaaatggctcggcatggtggctcacacctgtaatcccagctactcgggaggctgaggcaggagaatcgcttgaacctgggaggtggaggttgcagtgagccgagatcgcgccattgcactccagcctgggcaacaagagagcaaaactccgtctcaaaaagaaaacaaaagaagaaaagatttcttctgcatgcatggctcagctctgtggtccgctagggtccttcctcaatccgcttgcaacctatggaattaggaaagactgaaccaacctagatttattaatattttagtataacataatacagtgttacttattatagcattgaccgtatatgcccttttgctccttggaggaaaggtaattaatagctattatgtgagttaataaaataagcccaggatttatgagtgtaactaacctgttcccgttggttttccttgtctcctgcaggcagagagctgatcaaaaccacaaaagcaaagcagtgcccctggcccagttctgaagccaagcttccttaaccacccagacccatctctggttacgacttgctgtggattctcaggtgactccatctcaggatacagggactgagagggtgtatgcaatatctcagacccagaaactgttgattctgtctaaaaacacagcaataaccacatcccaccctcttgatttaaatgaaagtgtttgggggaataaaagatgaaccttttttttttctttgtcagatcttgcgctcatttggttctggtggggaacaacagctgtgagagaacacgtgtattcaattagaattaatccccctctcttattctcacagctgagcaggactcaagtgcctctcatctgaaagaggtaataagatttaatctgtctcctcatctaccttctgcaagtatactgaacaaattagctctcgggactcttccaaatggagttttatgagggatttgctaaggtaaacgttttagactttgaacacagttcagatttcaggggcagtactgaaatctcaacacacaataactttgaactaaagacactttcaactcaagacacaataactttgaactaaaataattatatttttgttgttttccactctgtccccacgtctatatcaccaccacccccaattccgccccccaggagctaactcctccttcctgtccctgcaagattaaaactcctcctggaagccccgctagctctgtctgctcgccttcgtggcagatatcgctattgtacttttatactcatttgtgtgataagtacttcaatgtccacttcttccacgaccccctgagcccctggagggcctggaccacacctagtttttctcactgttacatctcccttgccagacacatggtaggagcttcataagtatttggtgaacggatggcttgtttggtgacagtccaaaggctgggggacagagggaaagctccttcctatcgggctccagatgtgtggcgctgatggagaggaggctaggataacgcctccaggacagaagcgcgcacccctaaggcccctgccaaaaagaccttcctgaaggcggaggaactgcgagagtgcctacgttggcccaaggcctgacccgacgatcccggggaccctcgccctaaccggccccgcctcccgggcccctaacccggactcggccccgcccaaagctccggatcctggggcccgcccctggccccgcgtcggcagaccgtgggctcgctcctgggcctgcctcaaaccctccgcaggtaacgcctcccgaacttgagccacactccaaacccctcctcaaacccctccccgtttctcacaccctggacccctcgctccgtctcggccccaccccaagcccagctccctctcggcccctgagcccagccccgacccgcctcccagtcccttggtccctaccgacacctgcccctccctaagctccgcctcccagggcccgcctcctgagcgcagcccgcagcccggactctgccccgcctcccggaccctgggcccctccccatgtcggcccgtcctaagctccgcctcccagagtccgagcagcgcctggccacgtgctacgacatagtcaacgccccgccctggccccgcctcctgagcccttctccgggtctgcccttagccccgccctaagacctgtctcctgggctctgctccgagtctcgcctcctgaacccaatcatcgtttacccccaccctaacgccccgcctccaggacccttatcctgcccccacgcaaggccccgactccaggacgcctccaacctggacgcttccgaagccccgcttccaggatcgccctgtcctggccccgccccaggacccgccaaccagaactctccccaggacctgccccaacgacgcttatcctggccctaccccaggcctcgccctcatgacgctcatcctggccccaccccaggtacccgcctcataacgtcatcctggcnnnnnnnnnnnnnnnnnnnnnnnnnnnnnnnnnnnnnnnnnnnnnnnnnnnnnnnnnnnnnnnnnnnnnnnnnnnnnnnnnnnnnnnnnnnnnnnnnnncctcccgggcccctaacccggactcggccccgcccacgtcatgcgcccgaggagaacgcggggaccgaactctgctgcagagtttggagcgccgcttcctggcggcgcgtgcactgcgctccttcccctggcaggtgggcggcggggcgagcggagaggcccgcggggctcgcgggagtccaggggcagatgggatgggtctctgtgctgaagcccccggcgctcacgccacgtgagtgcctgggctcccgccggtcaggtccgcgcgacccgtttcccgtccctggggcctggccagagtcgctcgcacccctcctgccccgcgtgctggcggcgtaagctgggggcctctccaccgtcttggggggcagaggcgcactcgttgtggggtacagttcactatcattttcacgactttttaaaggcagtaaccgttctggtcactgggacagagctgccctcgcccattctaaaaagtcagcgccctcaggaccgcgggtaaccacgtcctcctgagcgtggtgaccaggtcacaggctgtccctcgtgcctcagtgttctcatctgtatgtcgagcactgcacagaattggctcatgctctgaggctctcamgcctgtgatggaagagacagagaagggggtggcctctcgtctccctggggacctgccattctcagcacaggcgcatggcaggcagcagcctcccttctgccagtagaggggcttaatgcacccggccccatttgtaatccatgtgcggtgagctcactgggatgagtcagtttggatatatattcctccctgggtctgccccattttatggggtgttgcttaatcatttgcgctattccattgacatgaaatatttagcactcagagatcatttctggtcaggagaaatttgtgcatttttaacccaaaatagaaaccttcataaaagcatcataggtctccattcaatattgactataattgttcacatgccacgctgaaagctaacttgggctcaccctcaacacccacgaggtgggtactattatcatcactcacatttgaccagagggattgtttgattaggtgcagtagttgagrgttcagacccaggagayagcctgcctgcttcgaatcctggcccaacccctggccctgtgtgaccttgggcaagtgcatctctctgtgctgttgttttcttattaataaaatgggggatataatgatacctacctcttagggttgttgtcagggttgagtacaaaagcctgtggatcagtgcctggctcatggtaaatgcatgttggtgttagctagtgtttttattcagtctcaaaatgtttaataaatgccttccgtgagccaggcaccatggatcagcagtacctatgacagatgaggctctgcttgcatgggagagccagagaataaacaaataaatgaagaaacaagaaaagaccagatgagagtggctttaaagccaataaaacagggaaatggtgaatggagcaactggggagaagagtcaccaaagtcggggaatcagggaagccttccccaaagaggtggcatttgaaatggggcctgagtggtgaagcagccagccatgggaagggcttggggaacaggatatgcaaacgtcctgtggtggaaacaagccagctgttgttgaggaacaacagcaaggcagccagtgtggctggagtggagtgagcagggtgggccaggggcgagggagatcaggccagagagagggattaggaccaggtcttgtaggaccttttacggcatggaaggagctctgaagcaatgaagtgccttgccctgtgtcacataccagccgagacagtctacctaattcgggagccaaagttcgctgctgggcttgaggcccctgtaagaggacaatgtaacccaggctggtatgggaacattctgcatttccacttaaactcagatggcaagcccatcaaaccttggtgccatggctgccctggtaaccagtgcaatcctggctgacaagtgcaaccagggagctggcccatgacccgggtggccgctaagtagccaggactaatgcggccaagagtcagtcttctagccttcttcctgtgactcatccaggtgcaccctgcaacatctgaaggtcaggctttcagctgctgtggcttccacttccaactggctccacatccccggggagagatcacacagcgctttgccaacacattctattgcgtgcttaatgttcctgtgaatgcacccttgagatttctctctctcccctccacacagagcttagaagcaaagttaagagactcatcagattctgagctgctgcgggatattttgcagaaggtaagaattccagagtccctgggactcatgaccctgcctcctgaatctctccggaagacctgcgagaagaagcacaggtgtgcttgtaccctttaaaaacacccctgttcaaagaacaaaaccattgagtcagcactgcaggtgggtgtcgtcacctccgacagctccagctctttcattttctaagacttagacaaagacatcagaatatacaaaaatctgcatgagaggggggaatctagggaaagtttttaaaccatccacagcaaaaacagagatgacaggtgcaaaacagcttctagaatttggtagatgttcagagactttcttttttgcattcatgaggcctgtcctgcccactcctgtctcttctagacctaaatgggcccttactttgcccagggtggggtttggactcaagagcatctgcatgcaggtgagaggcaggatcaccacccggcccagccacagcctgaccttggccttgagggccaagtgcagatcaccctgcatcctgggtcttcaccttcgaagggccatgagtccttctgaaaagagaaagcaatagactccctcccagaaagaagtgcaccagaagaatacattttccatacaaactcgaggcagacatcctccacccccacccacccagcccatcctaggatccccagtgaagaattcctgtgctagaggtgaaccaagattatccatgtggaaaagatgcagccacagcagggaagacttttggggcaatgcagtaggtcagggcttcgagcatggagatacctgaagttatctcgcaccctgctctgagtttcaccctgagcctcactctcgtaggtggtgaagcatgaaatgtagggatagctgctttaaaacccagcagaaggctgggcgcactggctcacacctgtaatcccaggactttgggaagctgaggtggatggatcacctaaggtcaggagttcaagaccggcctagccaacatggcaaaaacccatctctactaaaaatacaaaaattagctgggcgtagtggtgcacgcctatagtaccagctactcaggaggctgaggcaggagaatcgcttgaacccaggaggcagaggctgtggtgagccaagatcgggccactgcactccagcctgggcaacagagcgagactgtgtcagaaaaaatgaaaaaccagcacgagcatgaagagcctgtgtattgcgtggggtactttgctgcccttgggcagaatctgcatccctcccagccagcaggcactgcagactgtctcctccctctccctccaggctcctgttttcccaccatccccactcctgctgcaccagtccctctgccctcctttccaagtgccaggacatggccacctcagagcttgcatcacctgttgccactgtctggaacttgctcgtcctgcacttggtttctctcggctttagctggagtgtcacccagagcgtcccctcccctccatcccatccccaggaacacacgctgcaagagagcagttgccaagtgggccttccctcctcttccatagagccagacagttggcgactgtctttactgcaaaccctggttcacactggctcccctgggagggaggtggtttrggcccacgtgccctgcgttcttgctcagaatgggcattagaaatgctgccatagcctgtgacactgcagtggaagcatttttaggaaatggcttatatcataagacaaacttcagatgcatggggccagaacgctgtgtccatctacatctttgctgagggatcgggtagcctggagtttgccctctgccgtgttggcttgaagctcataggagacttaagacaggctcttgagcaaccaaagttctgtcctttgcggtagactgtgaagcatcctgtgtgtgtgaagcaccggccatcagtcaagtatgcctggtgctttctctcagaactcatcaaaaaggtcagttatgggcagtgtccrcccagtagctggacagcatagccacctgcgtgctggagcccccatccttcccaggccctgggcctgctttgcaaaccccagcatggcaggggcctaaccaggcaactggctgcagccgcgtgtgacccatgggagacaatgcagggcgggaagaaggggaggccagcgtctctccctcactctgcctcctggggtttccgccgcagctgcttctctggggccccagctcctagcatatggattctcattcctaccaggctagcccagcccacagcactggaacctgcacccacaccctctgtcctgcctgccgaagggtttggagtttcctgctcttgtccgtctctgggttgccccacgggcccctgttggaaggtttagctcttgccataactttggaactagttcctctggtgaattctcggcattgatcctgctggaatgtgctctttcctgactgatacaggatggattttattttttacttatttatttttttgagacagggtctcactgtgttgcccaggctggattaccgtggcacagtctcrgctccctgaaacctctgcctcctgggttcaagcaactctcatgcctagcctcctargaagctgggactacaggcacacgccaccatgcctggctaatttttgtatttttagtagagacagagtttcaccatgttggccaggctggtctcgaactcctgacctcaggtgatccgcctgcctcggcctcccaatgtgctgggattasaggcatgagccaccgcacctggcctaggatggattttaaagatgggcccgaacatgcagggtttgacataaggatgtcgagaggctgttgctcagtaggcagtagcagacctgctgagtgaaagggccacaattttagcaagtaaacaatcccctgcttctccaatacctgctttctccctaatcctccccaaaagggtgcatctgtggtcaccagcaggtctgccctgtgccaccaggagagggcagcagtcacccagtgtatcttgctgctgccctgtgaatcttaggatggggccagccgtggagaagcagcctgctgacagccacagcctgcagcatgggccgccctcacagttgtgcctgggctcacttaaaagcacctttggttttcctcctctctgtcatggtcatgtggcagctctcacggaatccttgtctcctgccttagactacacctaacactaccctctcaacacctctcgttgaaggscctcccatccaggtttccctaccaagtgaatttttttttttagagacaaggtctcttgcccaggctgtcctcgaactcctgggctcaagcagtcctcccatgtcagcctctagagtagctgggactattcggcacacaccaccaagcccaatgaagtgaatgttttatatgccagctggccggtattacaccattccatcccaaatctcccctccaaacttggtgaaaatcatctgaccatttttacagattagaacgaaagcaaacaagctctcactctgtctgcccccagcacgaggctgtccacacagagcctttggacgagctgtacgaggtgctggcggagaccctgatggccaaggagtccacccagggccaccggagctatttgctggtatgagaaggacaccctcctccccctcacagcccagatacccttcctgcacagacaaagtgaaaacgtgggtgtgggttcaaatcctgactcacccagtctgcagtcttagacatgaggtccgtcaaccttctttagcctcagtttccctgtctgtaaatcaagcacttcaacaacaacagcatgtctcatggggttgttgggcatttgtccaataggtgacacactctacctgcttcacaaggacctggtgtccagtcctcaaagaatactttgacaggtccgggtgtggtggctcacacctgtaatcccagcactttgggaggctgaggcgggtggatccgaggtcaggagttcaagaccagcctggccaatatggtgaaaccctgtctctactaaaaatacaaaaattaggccgggcgtggtggctcatgcctgtaatcccagcactttgggaggctgaggcaggtggatcaccggaggtcaggagtttgagaccagcctggccaacatggtgaaactctgtctttactaaacatacaaaaattagcgggtgtggtagtgggtgcctctaatcccagctactcgggaggctgaggcaggagaatctcttgaacccaggaggtggaggttgtagtgagccaagatcacgccaatgcactcctgcctgggcaacaagagtgaaactctgtctcaaaaaaaagtagaaaaattagccagacatggtggcacatgcctgtagttgcacctaattaggcggctgaggcaggacaattgcttgaacccaggaggcagaggttgcagtgagccaagattgtgccactgactccagcctggggaacagagctcaaaaaaaaaataagataaaacatagatacagaaaaccacaaaggaaaaacatagcatattgaatcatcacaaggcagccaccccttcatagccacacccggcccctggccacaactgacctgtgctccatcaccagaattccgttgtttcaggaatgttcaatgaatgaaatcctgtgtggcctgagatgagtgtctttcatgccatgtgacacccttgaggcctgtgcaagctgttggcatgtcaacagttagctgcttctctttgctgagtrgcgattggtcctgtcatggtttattcagccatgtggtggatggctacttgtcttctaagccacttgccttctgatcgctggactgactctctctccctctcttggtgcagccctcaggaggctcagtcacactctccaagaacacagccatcatctcccacggcatcacaggcctggtcacatgagatgctgccctctaccttgcagaatgggccatcgagaacccggcagccttctctcataggtgacctcggggtgcacggcagggcaccgaggcaggcttaccctggtgcagtcgcagacatggtcccctttcctcccaccaggatggtcctagagcttggcagtggcgccggcctcacaggcctggccatctgcaagatgtgccgcccctgggcatacatcttcagcgactgtcacagccgggtcctcgagaagctctgagggaatgtccttctcagtggcctctcattagaggcagatatctctgccaacttagacagccccagggtgacagtggcccagctggactgggacgtcgcgacggtccatcagcaatctgcaatccagccagatgttgtcattgcagcaggtaatgcccagccccgggcactctgtgcaggtggtgtccttgaagctctacccagctcttggctctgggaaaagggaacaatggacgctgtcgggcatggacatgatggggcttccagaagagttactctgggcctccagggtgacatcaaaggacaggggtgcctcttaaggtgaccttccagccacagccctcttgttggagacaggcatactcccgttacagtcgtcaccacatggctctgtcccagagtcatgcctgtgtctttcagagaccacaggaggaaaaaaccacttctgggatgaggacagggcccttgagagaaggtggtgtttggctgggccaccgaaaacccctcgcccctgccagcacactcagtctcctctctggtygaacagagctctgcctgtggtcctgggtcccagccctgaaaaccacaggtccagcggtggccagggacacaggcccacccctgcaagccagcagacaaattggcagacgcctgaaacacgaagttcatggcaggatcaggctttgtgtcattcacagccctctagataggccgagaaccagagctcgttttttaaggaacaccagtgagtctggagatttttttcttttgcttcggtcttttgcagctttctctactaagggttctcctttttcacccaagtaattgcctttccatctaatggcccaaatggtcaaatggcatctactagtctcatatgactgctgcctctctggcctcgccctgctgctgaggtcagcatgacctggaactatccgctggtccctttcagtaacctgaagctttcaccgtagacgtgctgtatagcccagaagccatcgtgtcgctggtcggggtcctgcggaggctggctgcctgccgggagcaccagcgggctcctcaagtctatgtggcccttaccgtctgcaacccagagacgtgccagctgttcaccactgagctatgtgagcccccacgcccaccggggcctgcatggtccccaagctgtccctgcgggactccagtggaagtgaaagaactgggggccgggtaaaagctaggatgccccacactcccacaccatgcggggaactagggcagaggccggtgagaagggtgggctcggggcgtgggggccttgtggcaggaggagggcagctcagcacagggagggaggatctgagcccagcagccctactgtgtgcttcagagcaaggttccctaagcccttgggcctcggtttcctcatctataaaatggaggtggcaggaggggcagtcggggtcagggctggacacagctgtggcctgcaggacactggggcacaggctgtacaggcggatccaccacgccactgtcctgagcacccagttgatggaagacgagcagggtgactatagagaaggggaactggccccgtagtgggccagccactgtcctcagacctgacatttgtcagcccccagcacctgtgagagtgtgctatcattgtcccatcccactgacaaagacactgggacacacagaggccaagcaacccccgagctcccacaggctgcagcccggccaccaggctctcgtgcctccacactacacccaagcccctcattgccaccagcctttgccccagctccccctgagcacagcccctcctggcagccatgtgcacagatgcacgtgcagcagcctctgcctgcacacagagacacgggtccaatgcctgtccacgtggagcagcccgttaactacagagccaacaaacaagccagcacacaaagacacactgggttccacgacagagtcccgcacaacctagcacaggaggctggccgggcgcgaggctcaggcctgtcatcccagcactttaggaggctaaggcaggaggacttcttgacaccaggagttcaagacttacctgggcaatatagtgggaccccatctccacaaawcatacagaaactagtcaggcatggttgtgcacacctgtagtcccagctactcgggaggctgaggtgggaggatggcttgagcccaggaggtggaggctgcagtgagccctgatctcaccactgcactctagcctgggcaacagagcaagaccctgtcttaaaaaggcaaaaaaaaaaaaaaaaaaaaaaaaaaggaagtctttcttcagatacttatgtgaaaaaatacctgcaatatctttgaagtgaaaaaaacagtgccaagcagcacacatagtataagcccccacccaccttttttttttttttttttttttttttttttttgagacagagtctggctttgtattgcccaggctggagtgcagtggtgccatctcggcccactgcaccctcccacctcccaggtttcaagcttaatcctcccatctcagcctcctgagtagctgggaatacaggtgcgtgctaccatgcctggctaatttttgtattttttgtagagtcgaggtttcgccatgttggccaggctggtcttgaactcctgacctcaagcgatctgctgcctcaggctcccaaagtgttaggattacaggcgtgagctactgcacccagccccatttttgtttaaaaaataataataatcacccacacatagttatgagtacctatattcccaactactcaggaggctgaggtgggaggatggcttaagcccaggagtttgtggcccccttgagcaacatagcaagacttcatctcaaaaacaaattatcacaataatcattttcacataagtatacctataggggataacctagaatatatatatagcaggctcgtccaagctgcggcccaacacaaatctgtaaactttcttaaaaacagtacgaggtttttttgtgatttttttttcttttagctcatcagctattgctagcattagtgtattttatgtgtggcccaaggagattcttctccttccaatgtggtgcagggaggccaaaagattggacatccctgatatacacgttaacagttgccatccttggatggcaggattatagagacttctacacgttcatgtctgtactacttcatttttataaatatgcattttccactcgtaacaaaaagctgtgattgaaaatcatcccgggtcacagtgtttcacacctgtaatccaacactgtaagagtctgaggctttgggaggctgaggtgagcggatcacttgaggtcaagagttcaagaccagcctggccaacacggtgaaaccccatctctactagaaacacaaaaattagccaggagtggcggtgcacgcctataatcccagctgctcgggagactgaggcaggagaatcatttgaacctgggatgcattgcagtgagctgagattgcaccactgcactccagccttgggaacagagtaaatctctgtttaaaaaaaaataataaatgaggctgagrcaggaccatcacttgaggccatgcattcaggaccccatctctacaaaataaaaaaattactagcatggtggcacgcacctgtcatcccagctactcaggaagtgggaggattgctagagcccaggagtcgaggctgtagtgagcaatgactgtgccactgcactccagcctgggtgacagaacaagatcgtatctcaaaaaaaaaaaaaaaaagaatcattctggctaacggctcttcagacatctgtgcttatgagaacaccagccccttctaagctgtgtgtgtgcgtgtgtgtgtgtgtgtaatttttttttttttgagatggagtctcactctgtcactcaggctcaagtgcagtggcacaatctcggctcactgcaacctccgcctcctgggttcaagcaattctcctgcctcagcctcccaagtagctgggattacatgcacccaccaycgtgcctgcctaatttttgtatttttgtagagatgaggttttaccatgttggccaggctggtttcgaactcctgatctcaagtgatccacccgccttggcctcccaaagtgttgggattacaggcgtgagccactgtgcctggacgctttctaagctttgtgaatagtgggttgactgagcagccaggtagatgtgggttcagatctctgcgtctgtcccgctgtgccaagtgctggggcagatgcgggcagagagtggacagcggcacggtgcctgctgctagccatttctatgcaaaaccagatttcttgtcccatcctggaggccaattctaggcacctgggtgggcctgggaacctgtgaaccaagtaaactgacttggacacaccccccaccccgccaggcctgtcctagcagccccacacaatacgctcatgtcctgtccccaaacactgccatcctgaaacacatgtcctctgtttccaggccgggctgggatcagatgggaagtggaacctcgtcatgaccagaaactgtttccctacgaagagcacttggagatggcaatgctgaacctcacactgtaggactcacatacgactccaacgggattgtgagaatcaagtcactctcgtgggaagagtttttatatgggaaagcggataaaactttcattggactggaatgtttggagaatgttaatttccaaatcaggaaccacaaactgccctctaataagacatcggctatctaagcatgtgggtgctccctttctgccagcaattctggttcttaagaaaatcaccatcaatcagacatgaaatctctggctccaaaaatagcattttctttgtgcaaataaaaacgtgtgtatcaagtatgatgttcccccaatgtggacacactcggttccccacaaagccaagcccgctgcagctgccacatccctggacacatttggttcctcacaaagccaagccygctgcagctgccacatccgtggacacactcrgttcttcacaaagccaagcccactgcagctgccacatccctgggcttacrgtgcagcaggtgcttttttcaagacaggaatcaaaatgttaggaacacggcggaaagatgacacctggagagcaaacgcaggatgaggagtactgcagaggtcacacggaagtcgcagaacagtaatccgctagcaggggcatggggcgtgaagaacagaagaagataggaagtgtttccgagcctccagaaaagaaatcagagccaagcacagcttcccgggtcacagaaccaattcatttaccaggcggcaccactgccgtcatttcaccttctggccactgggaggygctgctcgaaagggtttgccctgagactccgagaagaagctgcgggaaggacagcaggggtcccggggttttagcctctggcccaggagttatgtgtccataaccaaatggagcacactctgcacccatctctcatcccatcggagctgctgcgattcccgcaggttcttccggaactggtttagcttgcccgcaggatcaggaaagtttgagaaaagcatctgcaaaaaaataaagagcagagcttaactcatttcctgtccccaccccatcccaggtcaccacctggctgaccccaggtccccgacccaacaacaaaccctcccaagttcctaactccctcacttggactcgagactcttcacgccccagcagcgctccgcctccaacttgacatcacgctttctgtcccactttcccacacttcgtgccctggagcacctcccggcctctacacgctgtatgttcccctgcgagcaccctcctcttggcctctggccaagtcccacccatctgtgggtaacaagggggtgttggtgttcttttcagccttgctaaactgtctgaatcaaggatcacaaactacagcctgcaggccaaatccagcccacagcctgtgtttgtaaataaagttttattggaacaaagccacaccccttaatcgaagatgatctgtggctactttcacaccacaacagagtaccatggttctgacagagactaggagacacagtctaaatgacttctgacctggacctttactgaaaatcctgccaatcattctgttggcaagaatgatgtattacttttagcaataagaaacaagtaacctttgcagaattccacccatctttcaaggctggtcccagaagttccctttgcccatgcacctacctgatcctgatcacttccgaaactgcagcccggcccacccggctccagcatcatttgtggagtgtcagctccataaatccagagggcaggtgggggtgtgtcctaactttcccgagcctactgtaccgaaacgggacagcagagtaggccagcctctgtgacttctgctctctccctagcttttccgccagaccccacatggtcccaccctggctgtgggaagcagggatcagggagcatggctcagtgccagtctccagaaccctctccaccctggcgtggtggcagatgtggctacctgcagctgagctgccagttcctctgagtcctcaaagaccaggccattttcttcatgtttcaccagctcatgtaaactgcagagagaaccaagggagcctgagagctgcctggagaagacaccagacccctggggtgcccacctgggcttcagcctcccaccccatgctcaagccaggctgggagttggaacagggggtgtgttttccggggggtggttcttagatttggcatctgaagggtataaaggggggtacacatctaaatggccaaaccgatttgaagagggagacttaaggggggtttgtaccttctgtgctggatgctcttcaaggactgaagaattatttttgcatgtttttcttaactccatggccatggaacaagtaaagggaacacccgggggactggctcagcacataaaagatgacttttctagggcaccaggtttgatcccgacattccctgagctcagctcacaggaggggctcacatccctggatcccatccaggagccggctcctgagcaggggccaagggctcagcttgtgctggggctactgcttctagaatctcctctaacgccgcccttccaaacacacgtctgtgctgggtggagtggggccacagcatgacactcatttaactgattcaaacccaccacgtgagcttggccaaaagggacatggtgggagagaaagaaacaaagaaaaccatgtaagcctgcaggcaattcccgccaattctactctaggagcaaaagccccgagtggagttctagtatttaacatgcttttttttcatattaggttggtgcaaaagtaattgccatctttaatggcaaaaacggtgattacttttgtaccaacctaaatataacatgagctctaaatggaagcaactacttcagtgaggctcagcccagccacagtaaccgcagggctcctcctcgtggcctccagtgtgtgctggactgaccgaggggcagggcctcactgtgggcagctcactctacactgcttccccctcagcggtggatctgtgaagctatccccagaaagattcgggttctgctcctaccacttgaagttcacagcacacgcaggcaaacagcacccgaacatgtccaccaccttcatgggcaggtccaggccactggaggatgtgtgcagacagacacccaggtccaccgaccctgctaggcaagaggggtgggtcagagcactggtctctgccctgggaacacaaatcctcccagcacagtgagacaacatcccccgaggggagtgaaaatcggataagacccccgacagccccaagcacaagtggcttaagccggccaagcagccacacggcctggctgggacatctgaaaatgtaagttgacactttttctactaaatcacaatttggtttttttgttgttattttgttttgttttgttttgttttgttttgttttgagacagtctcactctgtcacccaggctggagtgcagtggcacaatctcagctcactgcaacctccacctcccaggttcacctcccgcatgtaatcccaacattttgggagcccaaggcgggcagatcacctgaggtcaggagttcaagaccagcctggccaacatggtgaaaccccatctctactaaaaaaaatacaaaattagtgaggcatcgtggcaggtgcctgtaatcccagctactcaggaggctgaggcaggagaatcgcttgaacccgggaaggcgnnnnnnnnnnnnnnnnnnnnnnnnnnnnnnnnnnnnnnnnnnnnnnnnnnnnnnnnnnnnnnnnnnnnnnnnnnnnnnnnnnnnnnnnnnnnnnnnnnnnnnnnnnnnnnnnnnnnnnnnnnnnnnnnnnnnnnnnnnnnnnnnnnnnnnnnnnnnnnnnnnnnnnnnnnnnnnnnnnnnnnnnnnnnnnnnnnnnnnnnnnnnnnnnnnnnnnnnnnnnnnnnnnnnnnnnnnnnnnnnnnnnnnnnnnnnnnnnnnnnnnnnnnnnnnnnnnnnnnnnnnnnnnnnnnnnnnnnnnnnnnnnnnnnnnnnnnnnnnnnnnnnnnnnnnnnnnnnnnnnnnnnnnnnnnnnnnnnnnnnnnnnnnnnnnnnnnnnnnnnnnnnnnnnnnnnnnnnnnnnnnnnnnnnnnnnnnnnnnnnnnnnnnnnnnnnnnnnnnnnnnnnnnnnnnnnnnnnnnnnnnnnnnnnnnnnnnnnnnnnnnnnnnnnnnnnnnnnnnnnnnnnnnnnnnnnnnnnnnnnnnnnnnnnnnnnnnnnnnnnnnnnnnnnnnnnnnnnnnnnnnnnnnnnnnnnnnnnnnnnnnnnnnnnnnnnnnnnnnnnnnnnnnnnnnnnnnnnnnnnnnnnnnnnnnnnnnnnnnnnnnnnnnnnnnnnnnnnnnnnnnnnnnnnnnnnnnnnnnnnnnnnnnnnnnnnnnnnnnnnnnnnnnnnnnnnnnnnnnnnnnnnnnnnnnnnnnnnnnnnnnnnnnnnnnnnnnnnnnnnnnnnnnnnnnnnnnnnnnnnnnnnnnnnnnnnnnnnnnnnnnnnnnnnnnnnnnnnnnnnnnnnnnnnnnnnnnnnnnnnnnnnnnnnnnnnnnnnnnnnnnnnnnnnnnnnnnnnnnnnnnnnnnnnnnnnnnnnnnnnnnnnnnnnnnnnnnnnnnnnnnnnnnnnnnnnnnnnnnnnnnnnnnnnnnnnnnnnnnnnnnnnnnnnnnnnnnnnnnnnnnnnnnnnnnnnnnnnnnnnnnnnnnnnnnnnnnnnnnnnnnnnnnnnnnnnnnnnnnnnnnnnnnnnnnnnnnnnnnnnnnnnnnnnnnnnnnnnnnnnnnnnnnnnnnnnnnnnnnnnnnnnnnnnnnnnnnnnnnnnnnnnnnnnnnnnnnnnnnnnnnnnnnnnnnnnnnnnnnnnnnnnnnnnnnnnnnnnnnnnnnnctgcaaacatggcggggtaagcaccggcctggcacgcgaccgcccactgggtggacccagccttttgtctgtgttgtgcacaggggacacgaggactccccctgccctgccacagcccccagagcacatggcgcaggttccaaaccgcccctgcccagccacagcttccagagcacatggcgcgggttccaaaccactcctgggagcctagaggccagaggagggaggagagcaggaccagcagctggcccagatcccgcctcttcccacaccacttccgcttttctccctcctcactgagtcaccttgaaagggctcagcagcagtaactgtgggacaggggctcttccatttgaaaacttaaaagaggtttggttaaggcaccaatgacatggtcaggcacagtggttcatgcctattaattcgagcatattgggaggccaaggtgggtggatcacctgaggtcaggagttcaagaccagcctggccaacatggtgaaatcctgtttctactaaaaatacaaaaattagctgggtgtggtgggcccctgtagtcccagctactcgggaggctaaggcatgagaattgcttgaatgtgagaggcggaggttgcagtgagccaagatcacaccactgcaccccagcctgggtgacagagactgtctcaaaaaaaaaaaaaagaaaaaaagacactaatgatgtaacaacaacaacaaaaagatgcttggaaactactgaaaaagtagaaagctttggatctacagattcaaatctgggctccctgccctgctgtgaaaccctctgagcctcagtttcccccatgtcaagcagtataagaccctatgcagagagctgcagtgaagattaaggagacaagatcgtgggaagcacagggtaaaggctgcgtgcctctccccctccaccatcccccaaccaaacagacacctagggtcccaggcggtacctgttatcacacagacgagagaaggaaggttgtgtccatcaacagtcagctgctcaaactctgtgtttaaaaaaagaaacaattctacatggaatttctgatagaatttcttcttttttgtttttctgacagactcttgctctgtcacccaggctggaatgcagtggcatgatctcagctcactgcaacctctgcctcccgggttcaagtaattctcatgcatcagcctcccaagtagctgggattacaggcgcccaccaccatacccagctaatttttgtatttttagtagagacaggttttgccatgttggcctcaaactcctgacctcaggtgatctgcctgccttggcctcccagagttctaggattacaggtgtgagccaccatgcccattcagaaaaaaagttttaaatatacaatagccagagtcacctggtcagttggagaaacagcactgctcttgtggggaggccaccagcctctgtgagatactctcctggaggaggcatttcagcctgagggcctggtcactcaatgacccaactggggattcagggcggcccacctccaccatctccactgtccccaggctgccctgcccagtggcccgggacaggaacatgctgcaggccagacaagcagctcacagctcagtggcccccaacaagcccagagctcctcaccacagctacacacctactttctaaagctgccagcaggatggagaagtcttcatcctctatgagaagagaattgaatgtcaggggcttgtttctagacacccctcttccagctcatacaccctccccttctcattgagaccgtggcggggtgggggcatgcaggactggcaggggtgagaacacagattggccaggtgcccgtcacaccaagcccaagtgttccaggggtcttgcagacctgtccagcctgtgctgctgaccagcagggctggctgctcgcggagaagcatcaccagcccgctcccagcatcccactccatgaaggccgacggctctgtggctggttcctcaggttctgaactgaaagagcaggaaaaaagcctgtgagaggccacagagcaggcccaggacccaggacgggcatctcctgccgtggcaaggcctgcaggctcccaaaggttggggtgcccggccacatcagcagcaccaggccacccctgccatccgaggcctgggcttgctttctctaatattgttgctgggtgctaaggttacaacagcaaacaagactgactcattccttttctccatgggacttactgtcttatcatcccctggactcaatatgagggtgcagggactccctcccacaccaccccaacttacccaggggcacagcttagggtgtgtggatctgcacaaaggtcccctccttaaccacgtgagacaccccaggggacacacaggtccacagatcctgccacaggcctgggaacccactggcaggagagtaagatagcgcaggggtccacaaacatttcttaaagggccagagagtaaatacttcaggctttgcaggccacgggttctctgttgcaaaacgcgattc

SEQ ID NO: 94661 - DNA, 50187 bp, Homo sapiens
  misc_feature (1)...(50187): n = A,T,C or G
aacccacaaaacaacttggagtgaccctatgatgaaaatgagtgtttgccttgtatctggagtggccatctctttcaggcatatacagtctctcactttgctctatctccacagacactaacaggtttcagtaaagccaagtgtcccttctcagtgctccaatggcccccatcacactgaattgtcatggtctgttggcatttctgtacccactgctggagtgggaacttgttctgactcagctgtgctgtcttagtgctctagaggatgcatccgtgaagcgtgttgcaaggaggagagagaaaaacagaaaagtgcaggtctgccctggcctgggctttccccttctcttcctttattgccatatgttgcctcagtgatgcagtcacagtgtccctgccacctttcagaagaagatacatctgcagcccagctggagaacctcaacatctgggtcccactatgggggccaatcagcagagatacaccaaggtcaatggagacagcagtccctgggagcagccgagccaggtgtgattttgccttgagagagaacacgaggctcttgagggacagataacacaacccaggtgaggaggaaagcaggtggacatgacctaagaagtgtgaggcctgatgactaagttggagccacagatagatttgggggccaggggtcaggagcctaaacagcaggttgtgggtggagttcaaggtgcactgaggttagttcttagcaagtagtactggctgtgtgctgaggtgcaggctggctcacaaacccagaggaggggctgttcagatgtctaacacgagaaactgagtaaaaattaaagaatggtttaggccaggtgcagtggctcacgcctgtaatccctgcactttgggaggctgcagtgggtggatcccctgaggtcaggagttcgagaccaacctggccatcatgatgaaacccccgtctctactaaaaatacaaacaattagctgggcatggtggcacgcgcctgtaatcccagctactcaggaggctgaggcaggagacttgcttgaacccgggaggcagaggttgcagtgaaccgagattgcgccactgcacttcagccaggacgacaagagtaaaaaaaaaaaaaaaaaaaaatggtttaaagaaaaaggacaatgttttacacatggatcaaattagacactgcaagactataaatctgcacccttctaatgtgaaaagggcttcactgagctatacttgtatattatgccctcgatattcactcaaggccattacaaggaacaaatgaaaacggcatcagcatttgctattaaccagttgagaacattctccactatttcaactaaataagtatccaggtgagaaacttcttttataatttaaccccagaaattttttttactccaaagaaccagttaacagaatagaaagtgttattgttttggctatcaggaagctcagccatgtttaattctcaatcacatcagctacattaacccataaaccatattatcgtcctcctccttataatctcatctcctatttctatattttattctctatttttaagtactcaaaacatttttaaagggctgaaaaagaatacacttgtggtagacatagcaacgtgccacccagatccccttcaaagaaggacttgttgacccaactattgggagagctgtcagcagaaaatcttcagctgtcagcccctcgaagatcatcttggctgcagagtgccatctggcccaggctaggctcttcccaggacattacaactcctttccaggctagtgccagacaacagagatcctgggagttggctgagactgtcatcaggcctgcatctcagtttagttttccctgtgcccactcctgtttctttccagtacctcccagagtgttgatcccagggccactccccaataaacatactgcacactaacctgtcacagagtccacatccaaagaacccaacctgtgacagcaccaaatcaaaagagactcaggaggctgaggcaggactgcttgaactcgggaggcggagattgcagtgagccaagattgtgccattgcacgccagcctgggcgacgagagagaaactctgtctcaaaaaaaaaaaaaaaaaaagagagaaaacatatcaggtaggggtattttacaaaggagagaggatatacaataaagtgttcatacatacatgggaagcaaaacagcactgactctggggccagactacctgggtttgaatcctgccttttagctctgtgcctcagttttttcatctggaaaatggggataataagagcacttatagggctgtaatgaggaagaaatgagacaatgtggataaagcagttccatagtgtttactatatgtcaaccactgttctaagtggtcatttaataaacagctgtgaggccaaacccacaggtcccgaggggcagttgggctgggactctccccagactctgggcatgggcacaggtacagtgtaggccagggcatgctgaagcatgcatgttcacagaaataggcctgagcagggctagcatgggtgacgtcacaggcgtgtgcttgtgtgggtgctgggctgctcctcccagacagcgcagctgcacgtattgccattcacacccacgcacccatatatatgctgagctgggggaagcccacacagaccacaccctctgcatgccctgtttttcctgcacctcctttggtggaaggaggcacctgaggcctgggatgctggcccagaagtcccaggaggaaatgggtcctgttccctgattacaggcctggcaacgggctgaaaactcaagctcttgttggcagggatttcttgagcccctagaggtccagacccagaggcaaaagtaaaagcaaggaagccttaccctgcatgttaggaagctcccaaaaaaatggagaaacggatgtaaaaagtgcatcagagcccacaggctgccggagtcagcacagtaagctcaatgagggctgcagcacttaagagggtgcctcctgtacaaaacaggatcagacagccagagaggggccccattcagcccccgtctgccttcctggtctcatcactccctgtcccctcctcagtcaggaaactctagctttgtaaccctaaattcaacaacctcttcctggcctcagggcctttgtacatgctgttacctctacttggaatgtacttttctccaacccacctttaataattcacctcgccatcgactcacttcctttagacctctgctgaggtctgaagagatctcgacccaatgtttttccttctagccctcatcataattgtctttatgtaacagagtgtttatttaatgtctgaactcccagagagctggcgctgtgtctctcttgtgctcctcatgttgtcaatgcccaacacagagaagagcagggtccacagaacttcaagcctaagccagttcaagccacactctgtgagcactcacgttctgctggattccctgtgcccaaggccagcggtgagcatgcctcccctcacccatgctgattaaccagatagcctccatgcccactgactactgaccaccaggacttacctaagccagtggatctcctgtgaggcagaaaactcatggagtcaggccgacttgggttctagttcccacctagtcatgttatgtggctttggggcaaattgtagaacttctctgaatctctgtttcctcatcagtaaattgtggaccatcattcctgattagaagataattatgaggatcaggtgtgaccacaggtgcacaccttcagcacagggtctacgctagctccgtcccgcccacgtaaagacctgccactaggtggcagtccatctcagctaccccaccgctccttactccacagaggctggctaggacaaagggtctcaatgtcatgctgaattctgagcttcttaggggacgcacttgaggaaatcaacgttaacacacaagtttccactacagcaagacaaagtcagaagcagcagccccaggtcactatccagctgagtgggttgcctgagcacacgctcttacaaactctagtctagtcctactatctcacaattcccaggaagcctggctctttctctggcatcagctggaagctctgttgggcttctcacctctgaaatgcagtaagttgtcctgctgtgcctggcagccgacccactgcctggctcaacatgtcagacaggctccaccgcgaccgtgggtgtcctcaattttggcggtgctgacaagggtagatagattgcaggggtgagtttcaagaatggcttcagaaagacaaagagtatgaattatattccataaccagaaaaaggccttgtggctggagaatggagagtgaaggatcacttgtgagagatgaaactggtgagatgggcaggtcatatagaacctgctaggccaagcagggagtgtggattttaggtgcaatgggaattcacggagggttttagcctggatgtaggggatcatgatttaatttcattttaaagatttaaagcatgataaatccaggcaaaaccaaactgatagatccaggcaaaaccaaacaaggtgagtagtctgggtgacaggagatggggccttcagcttgtgggctgagtgacaaggtcttgatggattggaggtgaggcaaagggaggaatcaaagttagctgcaaggtttttgaccttccaacttagagaagtttagcgccgcgttctgagaaagtgaagactgtggaaggaatcgtttggggagggaaggcgagctgtctaagggggggggatgtggaacatgcagtgggatgctggggcctggaacgtaggggagatgcaggtttggagtcaccggtgcctgtgttgttgggcaaagccaggggaaaggtcaggtcgccttgggatctggcctagcactgagtgcagaggaagagaagcttctgagatcgagaggcagcggctacaggaggaggaagaaagcaaggcggggaaaaccaaagttcaggagagcatttgcaggagggcgctgcggggtagggtctgagtcggagccccgaatcggactcgagtcctgtcgcgtggggacggagcgtgcagaggcccatgcgagggacagacacaaaggccctgggagctgcaggtcagaccactggacagcgcggccgcggacctaacgcccctgtaaggggtgctcacgcttggggggaactctccgaaagagaggaccactgaaagccaccctggcagcaggggcggaacagacagacgtgggtctggccgtcgccagaactgcctgcggaccagccccgcgctgccgggggggcgggacatgtcggctgtccatcagtgcccgcgaccaatccgcaggcagccccgcccccgcccctcccgggagagggcgcgcggaggacccgccgccgccggtgtgaggcggcccgtcctggctcccttgtccgggaagcccgcccaggtaactgagtttggccgggcattcccggaggacgcgccatcccctcacgtcccgtcccggtcgctgcatgggcggtgttcgggacgcgggggctgcgtctgtgcgggaccgcggggtagcggccgcccgtgcgagtacgcctgactgacgcgccggccgccgggcctgcggcctgtgggcggggctgccgtgcgtgacagggccgctcgtggccgccgggctgtgtccggggccgcgtgagaaagctctgcgggactgagggctgggtgggtcgaccgggaacggcgcgcgctcccgccgccatcgcgcctccgtccccgcctgcggcctgtctgggggtcgcggggcgcaggcgcggcgggccgacgggcgggggtcctccccacgggtgcgcgggcgcctttgttcccggcgccgaagcggggtggggcctcagggcagccccgccccgccgcgctgaggccccgccccgtgtccgcctgcaggagccgccgccgggtcccgctcgtctgccgcctcagcctcagccccaacctcagccgccgccgttgcgcttgctcccgggcggtcctggcctgtgccgccgccgcccccagcgtcggagccatggcgggcgccgcgtccccttgcgccaacggctgcgggcccggcgcgccctcggacgccgaggtgctgcacctctgccgcagcctcgaggtgggcaccgtcatgactttgttctactccaagaagtcgcagcgacccgagcggaagaccttccaggtcaagctggagacgcgccagatcacgtggagccggggcgccgacaagatcgagggggccagtaagtgcgcccacttcctgcctgggcccgccccgcgcgggggtcgtgggagcccggcccgactgcttgcaccccggccggccgccccagcgacttgggcaaactttcgggccctcccagactccctccgggccccgcccccgcttcgtctcgggtggtcactgggggcggggggcatccgggtcctcggtcacctgacaggacaccccccctcccccagctggggggagtgttccaggcgctttgccctgaggcctaaaaatcctcgcgggctggagacctgcggtgcaggcatcgggccccccagaccctgggagtggtggcggcgtcggcgaggggagctaaggcagtggcccccaccctgcacgggaacctggggcctgaccagacggtccccgcccactctttatccagaaagagcagtctgtgaaactctccgggcccccaggctgggctcttatttgcaaaggaatctttgggttccctaagtagaacttaggcagatgttgggtagggctggtcttggagcagagctgggcctactcatctccctctgggggagagggaggaaggtggtcttgtttggtttggagaagcctgagagaagccagtggctggaatttttttttttttttttctgctacttttgtcccaaagctgggttttggaggcctatgtgggtgggcagacactcaatgccagggcagggactccccttgccctgggaagcacgttcccaggagatgggccccataaaggcctgccccagcgccttggagtcaggtattcttctcaggagtgcagctagtttgtgagtctagccctttgtcctctgtccggtggcttcagggagcgggagcggcttctcttagtttcctgccttttcgccttcccaggcctgagcttggctgcttttgcgctggtctctagtgggaggagggagttgggggattttgaaaaaccccagatctttgagagttgttccacttagcgcgtgcctgtgctgtggtcggatgggcactctgctctgccctccattcccccgcctctcagtgtgaagagatggtgtgtctgcaactctagactgggttgcttcttgcagggacccccggagactagggttagagagacccaggctcagaaccaggtctgtgtgaaggagggagatcaggaagtgacaccccaagggggggtcccacaaaccttcttgggtatggtgtgcatgtgtgtagatagttgaggagaytgggaggaaggaaggtcttgtggtgaggcagccaaccatcctcagctacaaactccagatctgacacagatctaatgcagctgctcaacttagaaatggcagcccccttcctcagtgcccccactgaccctgtcagccattgggagaacattttagtgacttgagagcctgtggattccaaagtaaaggaagaatcgacactgcaaagagctgagataaccctgggaacatcactcaggcatcaggctccaggcatggtccccttccttactccctatgctgtgttgagttggtggcactggctggaagttctcagagatctcctgggtaacagactgcattttaaaccacgcatattagcaggcaataaatgtagcacagtggttgatggcaagtctggatttgaagcccatatattcattgtgtgtttcccggccagttacttaccttctctgagccttgatttcctcatgtgtaaaatgggggtaataatatatccagtatatatggttgctccaggatcaaatgagacaattcatataaaacatctagcattgtctgacacataaatgtttaataaatatgagctgttattagcaataacattaacaatagaccgtggctgcccttcaagaccctgaactgggaatggtgagggggtgaggtgtggctataggtgaggatgaaggtgcaggaagggaggaggacggtgaccaaattcacatttcacttagattgctactcagaraaaggcaggaaacagttttgttttgccccaacccatgtgcccactcacccacccaccatgtagaacagtgtttctgtagagaaagtgtttgcagttgtgcacatttgactcctgggtgtgacctttcttgtttgtaagttggggcctgaacagaaaagaggggtgcagagaggggatgatttatcatgcctcatgtatttgggggatggaggcaggcatacagaggacctgataaccccctacccaggggtgagcaggtgggtcagccagaggtgtacaaattcagtgatctcatcagttagctgggatttaacaggcctggagagtaggcagaggatgtaggaggaccctggcttttggattttgggggctcagattgaaaagagcctggatgaaaagtctggtcgatgcttgtgtgttcagacttaactaatggaggcttccactgaagccgtgccctgcttctacccattcgtgggctctccttgttggtgggttctgatccctgcggcctctgaggaggttggactgccagccgggttttctgccacctggactcttgcccaagcacctcaggtatctggcctttcctgctgaccctaccagggtaccagcagtgcctgaagcctggcctaagagagagacactgtgctaccttcagggtgttggtagacctgagggagagacagtgtggtttaaggagcactcatactgatatgtaagaccttcttctgccctgactctgtgccctctcttgtcagcagttgtgaaatggagctgacacctcctgatttctagggtggtcatttggctcaaaagcggggtggggaagtgcttaggtgttgacaagtttggttgtcctggtggtatgacaggaaccaggttggtgtttggccttttatgttgcagatactgacataaatgaataaaatgcagttatgtagagttccagctgagtgctattgagacctttcgtcccattttacagatgagcaaatggaaatggagaatcgtttgtgcccaaggtgttgtgtcagtgtgtgccagggcctcagctggggccagctcactagtcagaggctgactagcaaccccaagcccatgttccctgtggtccacgtggctcctctgtgagacacctttgtgctcagaccatgcattacagggcaaagaccactttggcttttgtatcccaagacagcctcagcctctctaggctctggctccacactttttcttctggtgttttctgagttgagatggttcagactcgtgtttaatgaggttgtccatttgagggtctttgtgggcccagtaaacactggtgtagacactgtggaggtactctgaatactggctgagcatgtccatggggacttctgaggccccaggcttctgtctttggctgatccttcactagatacttttctagatgccaggccctctgaggtgaaggagtatgggtgcttgcttttagggaaaygaaaacaggcaatgacaattgtgagcagtacctttgatgaagagggtgagggtggcggaakaaaacagctaactgccttgatgaggcaggcgggctcagaagggaggtagtagtggaaccagctggctggggcttgacccctgtggctggggagcagaccacaccaggaggcctgctccgagggctaggcccacagcacgggagagggcaaggcccaggccggtgtcatcaagggttttctttgtactggctgttactcccagtgggagaggggcaggagcacatgtccggatctccagagctagccatccctgcctgtgtatttcctgtctgatgtagttttttccaagggaagtcagaccttttagtgtttcctcagcaccccaggcttgccccgatgtgtgggtttccaggcccccccgcccagctgggatcctctgtttcctgtgaacctaggaaaagggcctgcttcacagataactggaggagctgagcacacccagtcctgggacccacaacacctccagcttctctccagactcttgtgtgtgtgtgtacacagatgcacaggattcagttggagtttagagatcttggctaccagctttgctctgggtagcttcttggaatgaggcacatttattaatatttgcaataagtattattatacctccccatttgcccagtgctaggcaccaaggattcaaaagtttattgagacatggtttgtgccattgatgaactcttggaaaagacagatgtagaggcatatgattataaccctgtgtgttacataccataatataaaggcctctaccaagaactgtgaggagctctgccaggaaggcattaaaggagaggtgacctttgaggtaggccttgaattactgaggcacctgtctgtgccgaggctaaggaactgggaatcactctgtgcaggggtagggaacagatatggtgtggtagagaggaagctgggactggttggagacagctatagccctagtgtgccatgtccagcagattacactcagtcctggaggcgacgggagtcagcggaggctgttgtgggactgacttgcctctgcctgggagaccacagtggcagtggtttgtcaggcaggtgttggggagggaggccagtgagctcctacggtttgcacagtttgcaggagagagctgctgagggcccagacaagaccttcttgctgaggcagggtggggatgccatggtggtagatgggagaagggctgggtcttgaggggtgagacagagcttagtagttaagcatttgggccctagactctgcttgaattaaaatcctgttgtgcagcttacttgctctgtgaccttaaagcatatgactacctctctgggctgcttatctgtaaaaaggatagtattaaatggcatttattttataaggtttttgtgaggatttgatgagaacctgtataaagtgcttagcacctgtataaagtgcttagcatggagtgtggcacagtgtaagtgcttactacgtaggatccctgacaggacagagatgaggattaagttctcaggaggacctggtggggaggagttcgaatgcacctgctgtcctaaggggctggtgcctggccaccaagccctttgattcagaggcaaggaggcccgcccatcctctcttgcagctctcagcagtccctctattgtcagggctctttcccactgctggttttgcagggagacagggcagttggctggaagcagctgctttgggtggtaaccccttctgtagagtgaaggtatgatattgtcctatttctaagtgcctagcccaggacgctatctggagagatcttgtctttgaggaagtgctctaatgccacagcctcgatgtggtagggcctgcctctgctgtcactgttctgtgtcagtctccgttaactcacagcatctcttcttactctgtgccttttcctgtgggaygtggcttcaaggagaccacagatgataagttggaggaagggagtgaggcctgagattgcaaaggtgtgatattaggagactgatttttccccctttccacttgctttgttagaactagagaagtcactgcagactgtgaggagagtcctaggagagatgggtgtgggataggaggatgggaatgttctggtgccccttgtagagtgccttgttgagaggagcatgggaacagtgcgtccttggagggaatctctgagagcagcatgtttacaggtggcaagactcaaggtggagccacgggtgaggagtggcttcaggctaccattgaccagatagtcccaccttgctggtaattgagctgaagtgcctggagatttgtggctagagctggtcagatttgggttcaggtctcagctcttactgtgaccttgggcagattacttttccctgtctgaaattgatctttagctgtaaaagtaatttctcctcacagagctgtatattaataataagggagattatatataagagtaagagattttatgtgaaaactacccagcacaacatttgtcacttagtggccacttaacagtattcatttcctttactctcacctttgttaaccacagagctccaatcttttccaccactaagctcggccacaagtggctgctccaacaacctgggctaggagtctgtttcctacttgctttctgtgttccttccctgagtctgtacacagaggactggggcatcaaaaaactctggaattggaatagcatattgggagttcatggaacattttctcacctgttgtattgtttgaacttcacagcagctccatgaatccatggagggcaggagttactatccctctcttacagaggagaaaaccaagccctaagggtaaggtcacatagcaagttcatggcagatcctaggatttcagattcctgctatagtattcagtttattctcccattctggggaaaatgataataggatggaccgttctataggaacagagggttattttgttttgttttgtttttcttccctctggccacatgtgtttgaccagcctagacttccatctgtggacaagctggactcattgcctcaatttcaaaacccgtcctgcactcatccttgccacaacaccggtgtcgagatgcttggcccacccagacctttcccacactcctacatgggggtgaatgtagccgctgattgggggtgggacacagaagagcctcaccctcttgactttctggtttgtggtgacacttccgcctaagcttctacagaacatgggaacctggggctccatgccccaaatatcctgagaagggcttttccaggattctctatgacaactcaagagcatgcattcattcatgtgctctttaatttgtcatacatttgttgtgggccttgctactgtgtgttgggcacactgagctggatgtgattactccagcctctgacttgttcatggtggcagtagatctctagcgtggtttgtgttccatctcaccatacctactctccttaaaaaaaaacaaaaaactagctttcttgggcctcagtggctcattgaataagtgagagacgacttgtgcttccctggctttagactctggcatttgctaactgtgccaagcactgtggagaccagtagtggacataaggttagggtagatacagccagaaaggagataaataggcagacagataaaattcttataggatttggtgagttctatgaaggaaataaggcaagaggctgctctgtcagggtaggtgagggtgtgctgtgataacaaatgatgcccacatatcaatggctggcaacaaggaaggttaatttcccctgtttgctatgtgtgctaacctacaccaccgtccctggagagtggcctcagtggttctgggtgaggcctctagtacagaacctgaacaccctgggcaaactaggctggagagggatttggagtatggaggtttagaaggaattaatttctatgacttaggatgcatgtggtgagtgtggctttgctgttgtggtagagtagagtgctgcctgtgtgggtcaagagactgtcttggctgacatctttgaaataggtatatttgtgtggcccttgcctaattgtcatctctgccatagctgcccccgccttccccaccaacccatggccctacttgagctgccygctgagcctactctgttgtggccacagtatcctcctgctgcccagagtttgagtttctcgctacttctgccactcatcacacttgcttcccagagctttgctgggtgtgctgaagtctccagagaaagtggggaatatgggtgcctagagacttctagggggtgttttcagcccctagagagtagagaagtgtgagaaggggttggtccccgaatattctgtagttttggggaagaagcaatggggacagtggagttggttgccttaagagaggctatggtcccaagagatgggacttggagagtctctacttgcattcctggctaagcccttaatattctcgcacccctccttgcaagactagttccttttgaggtggttcttggctagcttttgagaggctgcagtggctgtgtgcccaggcttaagtcctagctttctccccactctttacctcctaggaaccgggcccatcctgggggaggcagggaggagctcctttttatagtccacatgtaggctttgtgtataggctctgctgcttccttccggccctggcccttcctggtgttggccggtggccctggcttcagcaagactcaggatgcagagtaaacggggcagggcgttctcctacagaagactggcatccctttttactgagcccaggcctggcacagaggaggctggagttaggaagcaagaaaacgaggtgacccagtccttgatcctgagaagcttgtgatctggaccatgcagaaaaccgctaatgcccagggctggcaggagacagctgtgcctaaagtgctgtaggctgggcctgagggccaagatggaatcgcttttctccctgtagcagcccatcctaccccctggggtccctccacctgccagctggcacacaggtgttgggtaaagcatctgtacaaaggctgtgaggggcctgggcgcaaggcagcaaggcttgggtacggaggagagtgggtggtcttactgatgttctgggccctgacagtgaacagctggccaaactggtgaggagttgggccatggcgagtttggccacttgtttgtgtgtgtttagttcttcctgggcacaggtggggagttcactttggggttggcttcctgttttcttggacacctggggatatggttgagttaaaatgttctgagggaaatgattgttgagggcatgggcttgggtcatagtgtccttggcttggccttgcccatggtaggagtcgggtattgaccacactgggttctggctgtgtaggtgtggatgtgtggtgggagaattccaaccccaccttgacttcagcctaagrcccagagagtgtgggcctgagttcacagggtgactaaccctaggaaggagtgaaggagagctccagttggccataggtcccacaggtttctcagcttacttgggggcaggaggtgagctaaggaatacaactccattccctcagttgggaggttgggcagcgatgggggcaggggtgatggtccttctctgaggcactgaagacccactttatggtcaccctattctgcctgatagtccaccacctgtttggaggcagctcccctcttcctgccctagtcacttcctccaccttcaacagtaattgagtataatgtgcctgtgttagcttgtccatcctaactgggactgtggccttttcttgggcgttcttagcatatctaccaaggaggttggaaaaggtaacatatgtcactttgttaaggattttgctgagggccttttgaggccagcagtgaaacacagagcattccctccagtgagaacagaatgtctgttgccagactgatcacaagaggatggcctggttctggcctgagaactggtctacachggaagcatgaagctccatacaatcatgtgtgctagtaaagtttgggcaagcagctgtcctaagcaggtaaaacgataggttattcaacttcaacttcagagaaagaaatccaaggtagccatctctctcagtaggggaggtgagttcaaagaatttaagctgggctgggcacggtggctcacgcctgtaatcccagcactttgggaggccaaggtagggggatcacgaggtcaggagttcaagaccagcctggctaagatggtgaaatcccatctctactaaaaatacaaaaattaaccaggcgtggtgtcaggcgcctgtaacccagctactcaggaagctgaggcaggataattgcttgaacccgggaggcagaggttgcagtgagccaagatcgcgccattgcactccagcctgggtgacagagcaagactctgtctctttaaaaaaaaaaaaaaatttaagctgggctttctgggcaggcagtgagtgaatgagatccctggcaccttggagtgagatcagagtctagatcactcactggggccctgtttcccaggaagcaaaaagggaacaggagagtggcttggcttgggctggcatggcgcaaagggagtgcagccagatgctgtggcggctgggtcaagtagctctaaaacaggagagcctagtgggttctgctgaagcaggatgtctcagcaagcaggcctctgacctgacgacttccggtcattatttagaacgtctccagccccacagatttactctgttggaggcttaaggactaaaccaacatttactgtccaagaggtggcagtaacacagaaaccaaagaggcaggaaccaaggttggggtggtgagatgtcatggggttcagggagtggcagaggggaaggcctctattctccctttcccacttgtctccctacctcagcccctgttgctctgacgcttcccccaccactatgagtcctaggcccctgttgtttccttgtaggagggagaccccagatttttatttcttctcccaacccattccatttcctctcccttgtgagagggctctgcagagacagggcagcagagagagacttggagatatgctgggctgtggtcaggagggcctcatttatctagtgagcaggaacaggttatatagcagtgatgctttcatagtatttttcttgaataaggtccccaaaaccttattaagttcctggtaggcatggagcattgaagatggcagacatggtgcagtctctcaaggagtttacgctctagtggagaaaacaatcagacagccttaaaatacatgtatggctactataataaatactgtgaagcaggagtgcaccacgaaacctggagtcctctccatcctccccttctgtctgtgctggccctgcttggccacttccaacaaggattctgaggcattacagagcacacgtctagggtacaggcagtcttggctttgaagtattgttggctttgccactcaccaactgccaccttaggtaagttaattaacctctttgtgctcaatttcctcactcgggaattggggaccctaatacttacttcatagtgttatttgcaagtataaaatataaggcagtttttatcgttgtaaggcagtcttatcaagagctttatgcaatgtctatgcaaagtaaatatgcaagaaattagtgttaggatgccagatgctgctgttgctcatcgtctcttcccacccagcagaggtagtaactacttcatcctctacttctcagcttcttatagtatttgtctgtggactctaacgtaagctatctagcataatactcatatctaatttttccttccacattcaagctccttgaggtacttgtattccaagtatctagtttaatgtctctcatgtaggtgctcagaacgtatggttaattttgaataataaagccagtgggacttctcagagggctggattgggggctggtgagagaaaaggagatgcgaaggatcattctgaagtttggagtttgggtacctgtttgaatggtgatgctcttagctgacccagggggtatggcaagaggccttggttctggtgagagagagaagacagtgtttggttttgaggagttgtctttgagacgttttgagatgaagagtggggatagcaagtaggcagctgaattgaaggatctgaagcttaagaggagaggactaggctagagacctgtttgtgaattatctgtacataggaggtaattaagggtgtgggcatggctgacactgatgaggaagaaggcagagcaccggaagagaggaccttgacctgagccttgaccaaggccattgctaaatgcaggtaggcctgtagcgcacaaagaagcatgaaaaccaggcaaggttgtgcaggagaaatcaagggcagagcttcaaggagagagggcgtgatcaaccatgttgattgctctgaggtgtcaggaaggaggaccatagataagtgatttatgggtcaggcacggtgattcatgcctgtaatcccagctctttgggaggccaagactggcgagtcatttgagcccaggagttcaagaacagcctgggcaacatggcaaaacaccatctctgcaaaaaatataatcagcctggcgttgtggtttgcctgtagtcccagctacctgaaaggccaaggtgggaggatcacctgcacctggggaggtagaggctacagtgagccctgttggtgccactgcactccagcctggacaacagagtgacttatgggccaggcatggtggctcacacctgtaatcccagcactttgggaggccgaagtgagaggatcacttgaggccaggagtttgagacaagcttgggcaacatagtgagaccccatctctataaaatataaagaaaaattttaaaagtgacttatacccattgctctggttctccaagtagcctgagtgtactatgtgggggagcattttatgagggacttttgaggtcctgggcatccctgagacatggccctggtgggtccccagtctctctcctgtagctaggagcctggcatacacaggccatctagaaagaacttaggcagcatcagtctgcaagggaggcagagtttggagcacactagactcctgacacagaggctgacccatggctgcctggagaatcttctgggcttgtgcagaaaagttggggaaagccacctttccctactgtggcagtcaaggcttggtataggccatcttccctcccttctcatccatgatactctgaatgccctgtttgtggaacttagtggactcctgcacctctgtcttggtttccatgaacccctctgcccaatgtgtgcttgtcagccctccagacctggcttttacagagcactccaagacattgctctacacacactcagctccacagacacctccctgttgttctactcgttgcatgacctcatagttatctgcttccccatctgtttcctccatcaggcaggggttttctcaaaggcaggaactcaaatgccttattgatctctgtttccctaggacccagcccagggcctgacatggagtagatagatgcccgataaatgtttgatcagatgatggaatgaatgactgcataagccgaatagatcactgctgagtgctcttccagctttaatttctctgggtgggacctcctttcccttccttcctttggattctgttcttacctctgaaataggtgagattaatttagagtcctagggaagagggctgcctgcctggatggtacaaaggctggctgtggctgctctgtgtttctctgtatacccagtgtcagggatagcagctgctgtggggacactgcagagtgtcccagttctgccatgactcaccatatgaccatgacaagaccctttggaccctctgtttcctcattgtttcaaagagatttgtctagaatctagaccaagcttgtccaactcgctgcccgcgggtctggtttgaaggcagctgctgcacagtaatgggaaggacagtaagccccaccatcgccttccctttgccatataaccctgtgacctcagaagtccctgaacccagatccttgtttgtaaaatggaaagggatagctacccacccctccactttgaccttcctttggtggcagccagatgtgctcagggaaacctcagatttgtgagtatgtttctactgagaggcaggaggaggaatattatagtctcaggaagagggaggaatgagagggagaggagaactctcaccctttccacaggctttgggcatatgcagccagcttggaaatgctgaccatcctgtgacctggctactattgcatcaggcttccttcccacctgtgtccaggtcctatctttgtctcttctttggctacctccatccttttccttcagagctgcaaaaaccttgccaaagccgtatggtcctgatgggtgcagagcccctgtgcctctggctgcctgtgaagggggatctgcagtgcagtgcctgccgtaccccacagggagttgtataggaacctggggatggggtgactgaggtagggggccagaagtggcccagatgatactcacttctgctggaacttttctttgtccatctttcagcatcctctggtggagaaggcttagctccattaatgctctcctaggtcctggctgtgtattttctttggtatgggagtggggaactgggagggactcatctgtttgccacagactacatgtggagagggtgattggtgagaggtcattttggagatctacacacctcttctgacccctgggaccactctcytgaatctcctcatggtcttggcttcgggcccagcagggcgtgggtgctcggcatcctgctgcttttactgtttttcccaaagctctgttagcttcccgtggttcccactggctataggaatctttatgtaaggacttcccagtgtttccagactgtatttgcccccaggggtcacattccccccaactatgcctgctgctgctttttctgttcccgttgttacctcactgaccactgcattttcagtatttgttgtagcccctcagcctctgtggcccactgtgccacctcttccaggaagccatccttgataccatctttctggtaccatttttgagcatctgtggcctttgctgcctgttagataattagctctggaatctaactcccatgtgtttactcctgctcttaagtactctgaacattttgaggcctccccaggccctgggtttgtgttggactggtagggaatggagagaagagtcaaatgtggtttcttccttggaggagctcataggccagtggcctaagacaccagggaagcaccagcaggtgtgacaagtggtgacacacaagagaggagggggcacctagtgtgcccctggcctgggcctggtgggggcttaagtgaggaggtaggagtggcttgtgcaaaggctgaggcaggaaggagtatggggagacatgggctggtgtctgtgttgtgttaattggacttggacccttttgaggagggctgggctttccctgccttcctccagtgccctctgcagagtggggcacacaggccttgaggggttctggggtccacaggccacaggtgggggtagtaaaaacccccagaagggaaggaacctgtccaggaaatcttcgcttacctctttcaagctctttagattttaaagagacctttcatatttactatgagttgcagtttttttaagttacaaaatttctttactccatgcatgtttaaatggatagtttttgctaccatttacatcaattagcttacacactttgggttttgtgtttttgttttgtgtttttagagaaaggatctcgctttgttggccaggctggagtacagtactgtgatcatagctcatagagcttcctactcatctgcagcctcaaacccttgggctcaagtgatctttcccaccgcctcccaagtagctgggactacaggcatgtgctaccatgtctagctaagtttttttaatttttattttttgcagaggtggggtcttcctctgttacccagatgggtcttgaactcctggcctcaagcagtcctcttgcctcagccttctaaagtgagcgtatgcactttataaagggaaaaccctctctgaagagaaatatttcagacagggcatggttgctcatgcttctaatcccagcactttgggaggccgaggcaggcgaatcactggaggtcaggagtttgagagcagctggccaacatggtgaaaccccgtctctactaaaaatacaaaaatcagctgggcatggtggtgtgcatctgtaatcccagctacttgggagactgaggtatgagaatcacttgaaccccggaggcagaggttgcagtgaaccgagattgcaccactgcactccagcctgggcaacagagcgagacacccagacccagagaaatatttcagtgaaagcatgtttcatgttcagaaatttggggtacttttggttatggttttcttggccatatcttcatcatttggtgggtttagttttcaatatgtcctcctgtccctttctgattaaatcacttctgtatctcttacctcattggcatctcactgtagtccaatgaaggaggtgccaggagtggtgattctattttgcagatgaagaaaatgaggctcagagagatgggtccaggcctcctgcccaccttgccagtgcttttgttcataatacctctctacaccctttttgcctgctgagcggttaacaggcttataaatttgggggacctctgtctgttgggctrtttggaagtggcttttttgagcacaggggatactaggacacaggttccaacaagaaacttaggtctaatttagggtcttggatttgatgattgggctccctctcccccttctagggcctgccatgtgtctgcccmctagggcaggattggctggctctcactggctgtgctctgaggagccctgcctttgctcttctctttctcttccctagggttcctgctgtccttgaactctgccggggcaacaggaatactgcccttatgcacatcctcgtggtggccagacagggtggttatcccactttactggacaggaagagagctagtggcaggcctgtgacttggcctgatgtctcgggggagtcggggtgggagcaagagtcaaagacaggaagcagccctaccttcagaagagccaggcacacagatgggtcctttgtggttattgtcttctccctttcccaggttccagactggctgcccgccatatagcttgtcccttcgacagcaccctctctccccactcagtggattgggtgctgtcccagggtgggggcttactctcctgcagaggcaggttctcagctggccctgagggttgtatagcttcacagctcccagagtgcttgggcatagggtggctcagatgaggaaacaggctcctcttttaaagggaaagcaactgccattactggcatgtccaaaagggggatgctgtccaggactgcatggcccagaagctccgctctgagtaactgctggtctctaatctctgtggtctcaggccaggagtctgtccctgggctgagaagggaggggagaagagggaagagatggaaaaggaacattgctcttcccagtctccctggcctcgtcatataaccttttattttacaaattcagtcttgtggcattttgctttaatgcttagagctggccccaggtgccaggcagcaggcacatttccttctgcccaaaaaacaaaacacacatgaatctgaggttgggcgtggtaagggcaggccaaggctgaccgtcctatgtggatatctgtgaggtagtgtgcctacatgtaagggtctgttgtgggtctactcccacgaaagccttcatcttacgatgaaccagagaggactgcagacttgccaaggcctagctatatgcttggagccaggatttgaaacttgatctttggggatgcacgtgcctcagactattggtgagtgtgctggtggggcactgcaggctcaggaagcagcgtgtctgcatatgcttatctgtacacaagtctgtaagagtcccccttctccccatacaatgcccccatccctgccaggcttctttttgagctggcgaaatagctgcttgtattcttctcttcatggatcatctttatttcacccaagtttgggtttgcacctagtggagccttggcaagtggccttatttgtctccactactgccagcttttgtaggctccatgtcaatggcactaggcacacaggtagacaggtgggctgtctccagacttctctattaccagcacttcccagcatggccctcacagcaaccatgtgaggtaagaggaatttccagtttcctgatggggaaactgagaccaaaagagtgagggactgccaaggcctcatagctagaatttaagagctgtgtggttctcctcactaagctgggaaggggatggtcagggaaagcttcttgaaagagcaggagaaggcagatctccatcagggcagggagcagagcaaggccccaggattctgcctggggcaccaggaagcctggcttatgagaaggttctcagtcctcagagctgacatgtgatatacagtccaggcacaggtgtgtgtggtccctcattacttcagagccccttaagaaagactgaatctatttcttcatcagagtttgtgagcgattcaatataagggactaaatccccctcactgccccaagcagcttatcttgtcactgtctaccatagccacatttggaatggtaatgcccaggccattcctgaagcccaggcagcattcactgtgggcttggggacatggtgccattcctgaagcctgggcagccatcaccatgggcctggggacgtggtgctgggcagaatgaatatgctgcagccctgatgggctgtgctggctgggctttgccttcttgggtcaaggcgagcctgggcattaggcctttgtcattatgctatacatcaggcttctgggctgctacttgtgggatcctgcccttgttctcaaagagttcctccttctcactgccccatcttcttcatagtgacggcctcttcgtacccctggcttttcttttccccagagttcccctgaatgttgtcctctcatggttctgagttggggaggagtgctaggtcatggatttttgggtataacgtgtgactttcctactcccctaagtagttctccccttctcaagctcctaagttctgggaaggtctcttttcctgccctcctgactaatggcagagaggtctgacccagactgtgccagactggatcattcgctctgtcacctgccaccagggcagaggccattcctctctggggagtctccttgtgaatttctggggaccagctctggctctctcaagaaagaggatgctgccatatttgttctgggaggcaggaagatgaagggtgaggttgggaggtagcacaggatgtggctttcaagaacctagtagagcatctcactgtgctgccagggccaggctggtgccttcttacggaagacagtacaagggatcaggtgtggccaacaggaacttgggagcattggatgcctggcgtggagctgcgctatgcttacctggttcctrtctcaggcacctgttctgccttcaactgatctcaatggaaatatgtgcaggagtgcaggcctgttgactctgtgtgtgtgtgtgtgtgtgtgtgtgtgtgtgtgtacagtcacactcacctttgcaagaaggtgtgggagggggatgacagcagctccacaccggaagagcagactggtttctgtttcaaaaggcagagtttgtggttgttctgcagtttctgatctagccatttcccctgatggaagctcctccttctgtcattggaagccctgtgttctcggttaggtcttttatggcccagttctccctgcccctgtttctacccgagtataactgttcatttttgttccccatccctatttggttttccctccttctgcctgtgtacctgcctttttcatttcttcagtcattaagcaagccctggaggggccctgcctggccttaggtatgtgagcatgtatgtacgtgtttgtatgcacgaggcatcaagtgtattagtaccacaggaaggagcttctcagttgggcccttggtggaagagaagggagccggggaggtggacatttccagactaggaatcaagatgaaatagggatgggaagcaacagctattcttgccctaggtgtggcttagtgtggatggagcagagagggtgagagggcaaaagctggggaggtaaattcctgagccctgtcacaaagagccttcaaggccatagaaggtgtttgttgtttgttctccttagactggcagtgggcagcctcgggaggggcttgaatgaggtctaggggggtcagaataatgttttatgaagagccagaagactggggaaggatggctgatgggtgagaaccaggggtcagggaaaacagcagaaaaggcaggactctcagctggaggacaggctggaggggtttgctgaggggacaggtggttccaggtagaaccagaaatgtgtcggggagctagggttagggccagaagcaatgcccactgttccaggtgggatagatgtggagttttgtgacagttgctagagggacaggacaggaagagagcatctgggggagttgggccgttaggacattccaggcaggttggtgtgcagttcgggctggaagggctcctggggtgggggctggccaggcaaatgctggcactgcatctggctccgaagttaccaggccagtctgggtttagaggattttaagaggcttcagagcttggggagtactcaaagaaagtcatagctgttggctaagccaagcttttttcctttgacctaatctaccttaaatcggtgatttctgggctggaatgtctgccctccagccagcaggcagcccctccctgtgctggagagtgtgtcagagcctgtgcacctttgctgagggagcagaggagtccattggatgggccccctccatgtcccacatatagtgctgggtgtttctagctgttacgacttttgatcttaccaacatctttctgatgctattgtgttactcttatgttactctcttcacaggtgtagcagtgaggtcagagtggctgtcactttattgagatcacatagctaatgtgaggtagagctaggattttagttcagccagtctcacccagagctcgtgcatgttttttctaccaccctgccttctagagaaactcagtcaagccctttgctttacacatggtaaaactgagactctgagaagttaaataaattattcatcattgcctcaagttttagtggctgagggcaggtcatctgctattcaagcccgtgtacctctctgactatgccttgtgaaggccacgggagcatgcaagggccttggatagctaagataaggaaatggtcccaggcaaaatggtggtctgggtccaggatggttgctgctcttggacagccagtgccttggtcaggggatggggtggggattaggccccttgctgagacttgtgtggggatggctttagcagttaggcatttcagggatgcaccagtcctctgggccagagcctactttctcccagggatcctgaggcccatcttgacctacccagccctgcctctgggactttatgatttgatttgtgtgtaccttgtgtcaggaagtggtcctcatgaacagccttgggtccctatttctycttctggagtctagctcttttgcaggtcaaaatgtctcagtgagggaacaaagatagggaagggacaccccacwgaaccacctttcccccatatagccctctctgacatctcagcccttacttagcaaaggcctatccctagactcaacccagccctcttattaccagagtgactgagtggtcttggctctgcctctggggttcctccctgagagagagtgtaagaatgaggaaaccaggctgccctcctttcggtgttgactctgggagaccccagcttgatcttggcctctttgctaccttcctagttgacattcgtgaaattaaggagatccgcccagggaagacctcacgggactttgatcgctatcaagaggacccagctttccggccggaccagtcacattgctttgtcattctctatggaatggaatttcgcctgaaaacgctgagcctgcaaggtgggagttaagggggtagaggaggtagaggatagttaggggaatgcctgctggctcctgcccagtgggaggtatgtgccctcggggcagctattgataccttgctcacagccacatctgaggatgaagtgaacatgtggatcaagggcttaacttggctgatggaggatacattgcaggcacccacacccctgcagattgagaggtaagaaccactcctgaaggggttagggctgggagcattagggaccagggggacagggacagcagacctttgtgtgcccagacatctcccaggcctgactgtagatggagaagtggccctcacctcaggcttctctctccaggtggctccggaagcagttttactcagtggatcggaatcgtgaggatcggtaagtactgagctgtggctgtagcccagcagggtggggatgggcatccagaaccttagccnggcctctaagtagctgcccggagagccagaggacccaggggaccttaagtggggccaggagggtgggcagaaggttctgccacgtgtagctttctgcacaaagtcctctggtggccttggtgtgagctggtgagaggagccagccacatgctgtgtgccctgccactatgggcagagactggatgtgtagaactggctttgggtgtcctggaggtgagggtggccagtagcgtgtgaagggtgccctgaaactctggctctgagacctggtatggcagccagaggggccaaggagagaagggggagcaaagaccagatagtgtgggtgctgcaccatggtgaggtcctttgacctgaaagaaatgggaagccatggaagggttctgaggagaggagtgatgtgacctgacttgggttactcaagatcactctgcctgctgtgtggagagctcagttaggagctgtttccacactccaggtgaaaaatgagagggcttggatcatgatggtaatggtaggaagtggctggattttggccatgttgtattttgaagatagcgccagaaagaatgtccttaacagattgattttggggtgtgagaggcattgaggataatagtatgctgtttggcttgagcaactggaaaacagagtcaccattgactgagatgagaagatcatgggactagcccatttggagggaagcttgggttcagttcgaggcatgttaagttttctgatgcctattagctgtccagggagagatgttgagtaggcaggtggttagagtgagtttaggtacatacacagtaggggctacagattttaacttgggagtatgtagataacactgaaagccacagggctgggtgagatcacctagggggcaagcagaccaagaaaagggcagggtccagtggctgatcccagaccacccccatattagagattggaggggtcagggacaactagtgcggtaagaggagaacccccagagtgttgagttctggcagcccaaggaagaagacagtggtgaaatctgaccgttgacccttggatttaacatggtgagaagagcggtgtcaccctagcggtgaggggctcaagggaatgagagggagcaagatgactcttgcaaggagttttgctatggaggggagcaaagaagagggcagtagctggagagctaagcaggggcaagacaggtgtttttggtggaagaagtaacaagctgttcgtatgctgatgggaaagagaccacagagggcaagatcggtgatgcaggcagttgcaaccagaaggcctctgtttcctcactggaaaacaaggaccctgatagcacctacctcctgggtgactgaggatcagaggagggggcgcctatatagagccagccctccctccgcagtgcttgatccactcagtgtggcgctcagccccctcggggaattttggtgcctcctcccaggctcttggggcccagaggaggtggtcccaccctcccctcccctccttgacaccaccttccaggagagaaagccccccccttcccccttcttgtccatcctgttgccaggtctagcagtgtccccagcctcacatcctgggcaggacacccctggagagcaggggcgcttgttctctcagtttctttcctggagccaggccctgtctagccccaggaggtgcccagttgccagtcattgtatttggtggagcatgcacctcctccttcctccctctcatgggttagtgggttctgaggaccaaactcccagcatcccagtgggcagcaggtagggacctgctgccatgctgcccccaacagggaagttgtgagtgagccctgccttctgtcttggataggctgactgccaccttggcacaggcctcagcagtgccggtaggaggggaggcctggagtgtggtttttcttcctcccatgcctgacccactttactgaatctgttcacatcttccttgccagaattacaggttttttttgtttgttttgtttttgttttttttttttttttttttgctcagatgaggaactgaggtccaaagaaaggaagggactaacctcaccccatgggttctgatccagtcttgccctcaggcctccaggttcccagaatagtgttgtttacctgtccagccccaggtgggctyracccacaggtcagaggtcatgagaagctggatgagaccactggggatgtccctgttttctcagtatatcagccaaggacctgaagaacatgctgtcccaggtcaactaccgggtccccaacatgcgcttcctccgagagcggctgacggtaagtgccacccagggctgtctgtagatgggggcaggggaagccaagagcccttcagctgggggcctgactgcctgactggcactcctgctctataccatgcaggacctggagcagcgcagcggggacatcamctacgggcagtttgctcagctgtaccgcagcctcatgtacagcgcccagaagacggtgcatgagccacctgccctccctcaacccctgcccctgctcttccaccccacaccccagctctgcctgcctcagccctgctgccctgcttaggggcttttgggtgccatttctccagttcttctcckcttgaggcctgcccccatctgctgctctagcctgccttcttactagcccatttcccacatggcctcccaggggtcttgccctgaccaggttctgtttcctgcagatggacctccccttcttggaagccagtactctgaggtttggtttggagtggggaggtggggttttccctgggcccccttcatctctccactgggcgattcttgatccaggtgggaggcagtgggagtagggaaccatgctggaycattctgggaagctgtgctggctgggagttgggttctgccttccgtggggcaccttgttgtctgttgaccatactagctagcttaccttctctccctgcagggctggggagcggccggagctttgccgagtgtcccttcctgagttccagcagttccttcttgactaccagggggtatggctgggctgacattggcccaggctggtaggttgtggggggctgggctcatccctgactggaggcttctctcatcccctgccytccctaccccatcaggagctgtgggctgttgatcgcctccaggtgcaggagttcatgctcrgcttcctccgagaccccttacgagagatcgaggagccatacttcttcctggatgaggtgagcccgatgtttcacccattttttgtcaagagaatgagtaggggtgaccaggaccccacccgggctccaggagctagacgctccttagggatgccaccttgtttctacctactrtgcaccttgcccacccccagttgggacagagcactctctctcctacccccaacctaccaycttgggttggacagggcagggactcactgtctcttcccttccacatgtttctggacagtttgtcaccttcctgttctccaaagagaacagtgtgtggaactcgcagctggatgcagtatgcccggacaccatgaacaaccctctttcccactactggatctcctcctcgcacaacacgtgagtgtggctccttcaggcccacccagcttcttccccaggagggcccatctgaccatacctayctgcctctccttgcctatccaggtacctgaccggggaccagttctccagtgagtcctccttggaagcctatgctcgctgcctgcggatgggctgtcgctgcattgagtgtgcgtggggtccagggctgggggagggaagatgggaggcctgcccgcttgaccatggtgatgttgctccccagtggactgctgggacggcccggatgggatgccagttatttaccatgggcacacccttaccaccaagatcaagttctcagatgtcctgcacaccatcaaggagcatgcctttgtggcctcagagtgagtcggaggctggatgacccaggggttaacttggctccaggtctctcgttctagagggacagagggcagaaagactcctcaaatgccctgtcccctctccctcagcctttcatctttgtccttcctcttggcctctcctcgtcacctgctccctgcttgagctgttgcttcccaagttacactttctgtttcctacgtgttgggcccactctcttcttcatgggtcctttagactgtagaacacatgctcttctcatcttcagaaaacatgccctggtttctttaggccagtgtcctgccaactcctttgccctcacagcccagaagattgtctctgttccctrtgtcccattccttcaattctgtttactgcttaaactgtggtcactggtctcccttagctcaccagggctctaacagctaactttggaggcttctcctctctcctggcctctttggtgtgaaacatttttcttgcactgctgagcagcctccataattgggccagctcgggactgcatcagttgccaccctttggtttccactgctgccacagctgtmgaacccctctctgccccaccagtggctatggcctgcctcttttctgggatagtttttacagacaagaagcccccaggcccttggcttccaacagctcactgtgaggggctacttagacccagagaattgcagaatctgtttcactgtgcttgtcccccatcccgcaggtacccagtcatcctgtccattgaggaccactgcagcattgcccagcagagaaacatggcccaatacttcaagaaggtgctgggggacacactcctcaccaagcccgtggagatctctgccgacgggctcccctcacccaaccagcttaagaggaagatcctcatcaaggtggggtggcgggcttattgcggaagccccacacttctcagtgccttgcccaggccatggcttcagctgttgggcctaaacctgggtgaggaggtggggtgaggactggggtctgcattgccctgttctggttgcccctacagcacaagaagctggctgagggcagtgcctacgaggaggtgcctacatccatgatgtactctgagaacgacatcagcaactctatcaagaatggcatcctctacctggaggaccctgtgaaccacgtgaggactgggccaggctgggggtggtaggccagtgggtgtgaggaccctggctcacaagtccctctttggtctgttccaggaatggtatccccactactttgttctgaccagcagcaagatctactactctgaggagaccagcagtgaccagggcaacgaggatgaggaggagcccaaggaggtgaggaaccagctcaggtctgggggctgggccaggtcaggcctgggccagggtcacagtatctttgctgttgccttcccctgacaggtcagcagcagcacagagctgcactccaatgagaagtggttccatgggaagctaggggcagggcgtgacgggcgtcacatcgctgagcgcctgcttactgagtactgcatcgagaccggagcccctgacggctccttcctcgtgcgagagagtgagaccttcgtgggcgactacacgctctctttctggtaacacttcccatgcagatgcrtatgttcagtcagcrtgtgtacacagacatcacatcacccagagataatcagttaacatttgagcctttgatccaggacaataattaggctttacatggaacataatttcacctacatacacacacacactctctgtctcaccccccccccatacccctcccttttcggttcatttgaagcccacacctttggttcatgtgactgcccacacctgagctcctcaggagattggcctccctccttgaggctccctccttgagttccaccctcatttggggtggaacktggtctttggggccctggcctgttttccccagcctccctcactctgtgtcttccacaggcggaacgggaaagtccagcactgccgtatccactcccggcaagatgctgggacccccaagttcttcttgacagacaacctcgtctttgactccctctatgacctcatcacgcactaccagcaggtgcccctgcgctgtaatgagtttgagatgcgactttcagagcctgtcccacagaccaacgcccacgagagcaaagagtgagggaagggcctgggggcggacaaggcagggcagggccatgggtggtgctggccgggcctgactctgcctgttctcaggtggtaccacgcgagcctgaccagagcacaggctgagcacatgctaatgcgcgtccctcgtgatggggccttcctggtgcggaagcggaatgaacccaactcatatgccatctctttccggtgaggggtgtggcactgggttgtggggccttgcttgggtctgagctgccctgaccctgtgtgactgttttgtccttgtgaagggctgagggcaagatcaagcattgccgtgtccagcaagagggccagacagtgatgctagggaactcggagttcgacagccttgttgacctcatcagctactatgagaaacacccgctataccgcaagatgaagctgcgctatcccatcaacgaggaggcactggagaagattggcacagctgtgagggggctgtggtagacggggcatggcaggggaggcaggagagacccagaatcttaccagtctctggatgtgtgtaacagcaagacctggtgtgttgtagaagttcgtgggagggcccctgactccagctgggagccacagtgtgggtaccaggagggtgtctgcaggaggggacatctgagcagcatctttaaggatggggacaggcacataagcagagggttcctcatgagtcaagatgtggagtgaggaggttctggggctcacactgggagaggtgcacacagtggaaactcatccacctgggcttggcctggactctgtcctagggcagatgagatgaggctacccaagagtggttgtggagcctccgcctggtggatggtatggagggcagagccacaggaggtgagaccagtgagggaaaaagtcaggacccatggcagcacagctggtgataagggccctggacagaaggaaggggtctaggaccagaagatcagttgagagactgctgtcgtcagtagacagggctggctggggagagagaggcctgttgtccackggcacctgggactcaagtgatggagaggagcggcaggaggaatgtggggagtgggaaggcttttcctgactttgggctcagcagtgaaccaacgagccactgaactaaagcactgaatatgggtagtctgtgaagggcccacctgcacatagctcagaaatacttgggagtttgggcatttaggacctgagagattttagaatcctgggctgggccttacatgtaagaatgtgaagaaaggaaagggaacagtgaggccgggcctgaggcctctgaagccgtctctactgaggtcgaaggatccctgtggatcaggtgcaagtttgctgcamtgggggaaagggaagctgctccagaaaccagtagctgctttctacctctgggctctggggcattaacatatcccattgtgtcctgtttccaggagcctgactacggggccctgtatgagggacgcaaccctggcttctatgtagaggcaaaccctatgccaactttcaaggtacagctcaggcctctgggcataggaagctggggagggtccccagctgcttggggcttcatttctgtgttctgggccatctgtggtctttgtggagaagtggtggttgtggttttccgaggcccaagaggttgtgagagatgtgtggttggtgagcgaccgcaggtctcccagggccgacccactccctagcccctaccccttaagtcagcagtgaccctttaaactgctcctgtgggtgacccctgtttccttcctgggcagcagcggggtaggagctgggaggcacactggccactcattccccggcctcatggagccctgttacacaggttcttttttgttttgcctttttctctaaaaaggcctgggccctatttctcaccccctcccctccacagccaggggacctggaaggaagtttttctttccacttcacagatgagtggtagggtcccatccaggccccatatgcttccaggtcccggggaggcactcagggccactgcagaccctgccttcttggcctgccagccctgactcctgggagcggattcaaggttctccctgtggcccagggtggggcttaaggttccacctgggtcccgaggtatttcactggcagaggccctgcctctctgatcatatctgtcctggagcttccctgcagggcagtaacaagaactataactagggcctgttgatggcagtgtcatctcccactggcctgaccccaggcagggaagcccaagcacatgtgtgtgtgcayatgaagccccaggttggcagtggcagggagagcctttctgctctgactggtgcttctcacctctgcagtgtgcagtcaaagccctctttgactacaaggcccagagggaggacgagctgaccttcaycaagagcgccatcatccagaatgtggagaagcaagagggaggctggtaagccagtggtgtggtaggcccagagtccaagggccccagtggagctggggccccaaagacatgcatttgtgatgtgcttgtctcctgtgtgcaccagcagtgcctgcctcaccctggcttaggcatgggaacncctaccaaaggataccctcctcatgggagttcggggtggttgctggaggtcagcaccctgtggctcccacaggtggcgaggggactacggagggaagaagcagctgtggttcccatcaaactacgtggaagagatggtcaaccccgtggccctggagccggagagggaggtaagaccagaaccacctgagtaacagcattccctattcccagattctccttggcatgcccccatcacacagtcccaagcacgcacgtgcatgcacagacacctgtcacatgggctggtcgcacagcccatgtggccatgcacgtagtctcccatatacctgtgctacatttggcagtcacaggtacacccacaagatgtatttgtcccatgcacacggatatcccctcacacacatatgcagtagccatgctgaccattggtgggctttgcttcccacagcacttggacgagaacagccccctaggggacttgctgcggggggtcttggatgtgccggcttgtcagattggtgagctcccatctgtttctcttgcccactgttccctagggtgagattcttctttgtatctctttcctgctcctagggaggaagctgatggctgaaccccaaagtctgccctcactccaagctctccccatgctctggacatccccttgacaccctgggctccctttgtcactgtcagctttgacccctgcatgtttacctatgccaggcactggggaacccgtcagaatcagcagaacaaagttgatgctsctggttggctgacatccccaggcctaatgggttgtaccacagggatgtgacagaggcttggagatggggtggagagggagacacggcctgaggaagaagcatgagtcagagctgagttggaacactggctccaccacaaccagcagtgacttgtttgagttgtagcgtcgtcatctgtcaaatgggccagcagagtagtccttcccctcatggggtgtgggaaggaggaaatgggatgagatagaactcatttgagccagtgcctgcrgtgtggagtggggtggagggggtgagatgtctattcccagctgttatctgctctcgccctcccagccatccgtcctgagggcaagaacaaccggctcttcgtcttctccatcagcatggcgtcggtggcccactggtccctggatgttgctgccgactcacaggaggagctgcaggactgggtgaaaaagatccgtgaagtggcccagacagcagacgccagggtgagattctgctggaaccttctggggggcagtgtgtgggcccgtcaggcagctgaggcctccagctcccagcacaggccccctcagagcagtggggcagccgatggcctatgctagataggccacagcccctgccttagctagggattgagaagaaacagacwcataagatgcaatgtggtgtgtttaggttgtgttgagtttgagatactgatgggtcgttgaagtgggtctgcttagtgggcaattggatacacaagaccagaggtaagaggagaagtcctgggctggaagcaggagtggagtgggggctgaggcatagaagggatgaggtggtgtcgcataggaagagaacttgggatggattgagaagctccatatgagaaggcatgggcgaggaaaggagcccaggaaaggcaggtcagacagactgcaggccactggtgagggagagggtctgctgtgttgagagctacagaggtaaagacaggaacgataagaacttgcaagtgccctttggattcagcagcagctaatagcccttgtgagacttttgagctgcatcagcagcatggctggcattagatggcagtgggcagcagggagtctggaatggcaaaagcagagcctttgtagggcctgtccttgagggagagaacaggtgactggggtttgagcaggctctcatgcagatggctgaaaggagcgagcagcgtgtgggaggagatggagcccaagcttagctggtaggaccagccttctggagaaggtggcctcttcccctgagcctgggggaacagagaagtattctcaagggttagggaattcctacttggtggccctttcaccaagtgcatttggtagatgggtctgtagctgctttggagagggcacccrcaagccaaatagagaagggatagggtgcttgccaggctgtcccctagaaggaaaaggtgctggcataccaggtggttgaaggactggatctgggggtctaggctgaaaagggaagagtctgaatgtaagagccactgaggccgggcgtggtggctcacgcctgtaatcccagcactttgggaggccgagatgggcagatcacttgaggtcaggacttcgagaccagcctggccaatatggtgaaaccctgtctctactgaaaatacaaaaattagccgggcatgttggccggcacctgtaatcccagctactcgggaggctgaggcaggagaatcgcttgaacccgtgaggtggagattgcagtgagccgagatcacgccactgaactccagcctgggcgacagagcaagactctgtctcaaaaaaaaaaaaaaaaaaaaaaagccactgaaagaaagtcctccaggagaggatgggttggggtgcttgtaagtgggcttctgtagagatttggcatggagatttgccatgaagagtgggtggttatatttgagttgggggcgctgaggcagtgaggatcatccttaggacacagatggaaaccaagccaggggcctgtatccccagtgcagtcacaggtaacacagaagaatcatttttaccccagcatgaggctgggtaataaatggtcagaaagtgtcatttgggagtgtggccaattccaggatccctggaaggtcactgggaacatgggtggtgatgaggagtctgtatcccccaccccccctaagagggttggagggcaaatgtgtcctctgggacagaaaagaggaaagatgatttcaggatgaggctgaggacagagctccctcatttactgttgggtgtggtgtctggaaggtayaggggaaggtgggagaggggcccagagcacctgcagtgtgggcatgcccaaggttggcaggggcttccttctcctgggcagggctgtagcctggggctacagggccttgtgtgtgtcaccagctcactgaagggaagataatggaacggaggaagaagaytgccctggagctctctgaacttgtcgtctactgccggcctgttccctttgatgaagagagtaagggccagggcccaggcggggtgtgcatgtgcctggagggcctggtgggtgcaaaaagagtatttaggtatccccccaacacttcctgggtgggcgggctctgtaagtgttttccctgtttggcccagagattggcacagaacgtgcttgctaccgggacatgtcatccttcccggaaaccaaggctgagaaataygtgaacaaggccaaaggcaagaagttccttcagtacaatcgactgcagctctcccgcatctaccccaagggccagcgactggattcctccaactacgatcctttgcccatgtggatctgtggcagtcagcttgtggccctcaacttccagacccctggtgaggaagtcccctgtgaggagggtgaggaggggcactgtggggcagctggactggaatacaccataatctgcctcttccagacaagcctatgcagatgaaccaggccctcttcatgacgggcaggcactgtggctacgtgctgcagccaagcaccatgcgggatgaggccttcgacccctttgacaagagcagcctccgcgggctggagccatgtgccatctctattgaggtgggtgctgctcatctgggcttcagggtaggaaaggggctgcttgccgttggagtctgtttatgttgagttctccaaaagtaggtattttcaggcatcaaggtggtcagggtgggtggggcctgagctgagtctttgaaggggtgaagatagcatgcagtcactgtatgcatctaggacgtgcagagccatggtgtgacttgttctgatgacttgttttgttctgatgagatcttttttttccctaaggggaggtcatttaaaagatttctgtgttaaaatagtaatggatttaacatgaagtagattgcaaaactcacatggaaattttggctaaagctcagacttcagataaactacaggcagcagctgctctggacagcttagggtccctgatgtcgtgagggactccatgggcagtgtcccgggggcccagcagagggcgcgctgcctccactccacagatgctgactgagcctccgcagtggggaattggagggagcaggaaggacaatcccaggcccttctttgtctgcctacaggtgctgggggcccgacatctgccaaagaatggccgaggcattgtgtgtccttttgtggagattgaggtggctggagctgagtatgacagcaccaagcagaagacagagtttgtgggtcagtctgtcttcccagtcatcctcctcatcctgctggggcactgcaagcctctccccaccagtcatcccatcctctcccacggtgacctgaagccttttgtcgttgccttcacagtggacaatggactcaaccctgtatggccagccaagcccttccacttccagatcagtaaccctgaatttgcctttctgcgcttcgtggtgtatgaggaagacatgtttagtgaccagaatttcctggctcaggctactttcccagtaaaaggcctgaagacaggtgaggaccattcctggaggcagtgcccctgcaatcttgctggcagggtggggctgggccccttgctctgtccctcgtgggctgagggccaggcttttcctcctcctaggatacagagcagtgcctttgaagaacaactacagtgaggacctggagttggcctccctgctgatcaagattgacattttccctgccaaggtatctgcagcagggstggrctggcctggggtaggtgggaggagagccaggcagcagcctctagaagtgcagaggagtcattgaccctcttgtgcacctggcttcgttgaagcaggagaatggtgacctcagtcccttcagtggtacgtccctgcgggagcgkggctcagatgcctcaggccagctgtttcatggccgagcccgggaaggctcctttgaatcccgctaccagcagccgtttgaggacttccgcatctcccaggagcatctcgcagaccattttgacagtcgagaacgaaggtgaggaagatggaggggtgctagagccaggaaggcagtggctaggtcctccttcttcagtgtttctttctcctgggtagaaaagttgtaatattgtctggcattgggctgcaaggccctgcctgccagtaaggacactcttcccttctgtccagggccccaagaaggactcgggtcaatggagacaaccgcctctagttgtaccccagcctcgttggagagcagcaggtrctgtgcgccttgtagaatgccgcgaactgggttctttggaagcagccccctgtggcggccttccgggtctcgcagcctgaagcctggattccagcagtgaatgctagacagaaaccaagccattaatgagatgttattactgttttgggcctccatgccccagctctggatgaaggcaaaaactgtactgtgtttcgcattaagcacacacatctggccctgacttctggagatggatccttccatcttgtggggccaggaccatggccgaagccccttggagagagaggctgcctcagccagtggcacaggagactccaaggagctactgacattcctaagagtggaggaggaggaggagccttgctgggccagggaaacaaagtttacattgtcctgtagctttaaaaccacagctgggcagggtgagaagctagatgcccctgcagtttggccctggagccagggcagaggaatgtagggcctgcatggagaagggttctgccctgcctgaggaggaggacacagcacaagggcacattgcccatggctgggaacatgacccagcctgaaagatacaggggatcatgttaaaaatagcagtattatttttcgtctcaatggtattgtaactaagttatttactcctcctgctcctcacccctgtagggaaaccttggagaggagagtggcaggtgggctgcctgctgtgttaagaggacttagtttgtgatgtaaggcactgtcaggaatggggggcgggccagggtgggaagagaagaaatagcagagcctattttggtgaggttttttgtttttaagtcaaagaagactcagtatgctttccctgaggaatgaaaaagggattgaggagttgcctgactcctgggtgggtggggtacaggcagttaggtgctgaatgaagctgccatccttgctgcagcttctaactggtaaaaagatccagggatggagatgggaaggttagaaaggcagccctcacctctgaggacagaggccggggtccaggcccgtgggcgcaaaggtgcctcatagcatagccagcattcagcacacacaaacctactgcccacatttgggctcagggttggccatttgctagttctgctgccctcttaagatctgactgccaaataaatcatcctcatgtcctttttcctttgacttgtatgctctttcgggggctcaggaaagcctgttgcatgggacatgctcactagaaacagtcgccagatgattattctgcagtagaagcaggtaggaaatttctggaaatttctcaggttaagcagcaagagctgtaacccctcctctgggctaacaggagttgtgggtccactctctcctgcccaccctctgagggtgtgtctgagcagagtacatcctgcctgggttctttgtggccagccagttttggtggtgagctggaaacaaccagagcccctttccagttccacagaaacctctcctttcaaaaatgttgcattcagttcgttaacactgccaggtgccattctgattgcctctaggacttggcagctgaaatctctgggccctttcaacacagttgaaaggcccttctcttcctgaagctctgtttccatagttggctgtgctgggatggaacaaaaatgacgccacacaaaaaatttaagatagatccggttccgtggatgacatgaactgatgatagccagtatcaaacagcgatagtgctcaggttcttgtgtgactttcttttacagcttcacagtcccagttcatagagaggagggtggctttttcccatacacaagaaggtggtgggtgggaattcacctgggccctcatgatccatgtttcctctctaggtttttatggcctggagagaaaggtttcctatcagagaaggaagaggactgtgtaggcccttctgttagggcccatccacgttggttaggacgtccttggcgtgtttgttagtgttgacccttttagttttcatcaatacgtatctctatttgctgaacaagtgtctttctggaacacaacctggggaacagacagctctgcctttcttaaggcagctttgtagacctgaggctcacctctcttgggctctgtaagacattgcctttgcctcactgcaaatgttttgattgttcttcctagtggaaaacgtgccaactctcaagcaaatttaaagatcattttcacttcaagattcctccagacctgacaaatgttgattgacccagaaggcagagtgtttgttggtggggaagacccttacttggggccgaatgctttggcatcaggagttgtttgccccatcccatgcatgcaggccgtgtccctacagtgcgacagctcagggttatgacctgtggagtctcaaccctaacagcacattagcaccacttggggagcttctgaaaaatactggtacccggggccttagcataggtattgttcaaaacctctcaaggtgatttaaatgagtaacaagggttgaaaaaccctgattttggcagcacaaaccaaaagagcaggcagggccgggagagggaagtcagtggtaccagaaggtagatgggctcccttgcaggctccttgttctcctgccatcaccagtagaaccttctggctgacagaccagggacaagtagactgggttcaaagtgacagacctttcactttcaacagctttggctcagcagacatgtacacatacaaagtagagcctacaaggtcaggggcattctgcccccgccacaggactaaagactgccctgcgggaagatggcaggagcagtttctgacctcagttgagtatctgtggccatgagcagaaaaggcaggggtctgcctcctgaccaagcacatcttgaacatcacctgagagcttgaacatcactaaggacctagacactcacttgtctttcaacttgagcccatcactcaccatgtgagttctgttgagggtgggtagaaagcaaataggttcaggttatcccaccagactaactcggtgaatgaaaggatcatgccttcttcacattttaattaaatggatcaagcacagtctcagactgcaactcctgtcttctctgggtactttagtaattcccaggggacttgtgcttaggggttaatctaggcattctgttccctgcctggaggaaccccacagcaacccccctggctggccgctcctgcgaattccacccatagtatcccaagtgagtcactgcctgagtctacccactacagcattcagctgattggctttgccagttgcatgccagtttggtctagtttccaaggacctggtttttgggattcaacacacacagctgcttccccatgacataagctggactcctattctggtgtccagaatcactgcctggctccactgtaggtgatttcatttcaaaggaccctttttccttctgtcccaggccttcagggccaccccaacaaaattcaaatgctttgggtcttagaagctggggctttagtctttttcctccagaaagcccctgggtccttatgcatattccctaacccccgacaccgccccagcaaatgacaggctatgcttttcagcactctcacaggaaacagaaaagaacttgccagtgtcctctcaccagatgataccaggtttgactgtttgcctttgtctatttagcataatttctaaaatatcatagttttctcatgtagaagccagtgtggtgatctcagcaatgcagaagacagtgagttggaacttctctggtgagctgagggaaactgccccactcatccactggagtttaagatccacagaagtgggcaagaacaagtgaaatgtttttggcttttttcctgactcccccacaaaataagtcagcagatgtgaawtatatttatgtttttatttaggaataatcaaaaggtttgaagtaccattgaggcccatttcaaattgtacaagcaatttgtccgtgttcccctcccttatccaaatccacagatacaaaatctaggaaatgtgcaatttgcatcttaraaatagcagcatccccacaggggacctcgtgaggcctggagattcagccccaagagggcaaccccactcctgcctcagcacgaccacagtccaaaccgaagttaagttccatttttttgttaaaacgtttacccagggtaaagaattcccattctacccaaggcttaagtgatagagtatgctgttttctcggtttggtctctcacacctggccatggcaggagatgggaccctcttgcagagtttggctaaagtttcattgtgcctcaaaacaaacaaaaacagggcagttgcctcttacttgtttagcaccaagatgatcaccttttcagccatctctcctgacagcagactgctcaacagtcactccccagtcttattgcccagaagtccggccacagggaacaaggctttgtgctgaagaccaaaatgcaaatgggtgctagaaaaccaggaatcaagaccttgtcaggaggcatctacargcctttggcaacctccctgacttccacaaaggctgccctcartaaaactcaatgaacaatggccagcaggggagaaaggaaggtgggcgtgttttctctttaataacaattatggcacaatctgaccctcctaacacttctgaacaaagcaactgctcagaagcacagcgggaaccctctacacaggggtgactgcttctcccctggccccgacccagtctaaccgagaacaaccggattgctgtgctgggtccctgctgaggagtagggactggcgctcctcactcctgctgacaatctcatgtggggctctggccctgttccaagcaaactgcaagaacgagaccaaacagtatgggcaggaaccagggatgagtgacaagatctccctaaacaaattacaggattcataggtaccatgtagatttttcttttaaatgtatttctactcaggtttgattcttgggaaagaccaagcacttgtagctctctattcagtgactaaacaacctgacatttcacttttaactccagtcacattaagttttttttttttttttgagacggagtttcgctctgtcgcccaggctggagtgcagtggcacgatctcagctcactgcaacctccacctcccgggttcaagtgattctccttcctcagcctcctgagtagctgggattacaggcgcgcaccaccacgcccggctaatttttgtatttttagtagaaacggggtttcaccatgccgatcaggctggtctcgaactcctgacctcaggtgatccgcctcccttggcctcccaaagtgctgggattacaggtgtgagccactgcgcccagccaagtcacgttaattttgaatcatccacttacggaaaggaacagaagttaaaaagcattaaccaagaaaaactattcattaacacatacaggtgctcatgtgtgtgtgtgcacgcgcacatgaacacacgtttcaagccagtctcctgaaggaagaggcactaatggcaggtaaatgctcaggctcctctcagtaccctggggctcaccgcctatccaagtggacagcagggaaggtgcctagagtccccaccagagcggctgccttcctcccttcgctcagctgccagagcagccacgaaagccaaattctcagggctgtggaagctttggaccagcaacaacaagctagtacctatatgttctttatcatcctcaaagtcctgcgaacccaaagatagaactttcagaaattgaggaagggggtgctttcccctgtccttgtccatatggtaaccagggtctgcctagtctcatccccagcctctgggttccctcccctgctctagacttcagggcagttagaatggatgactctgctggatctagagctaaatagaaacttctttgccatagaaacttctctgttgaaggactgcgtccccattcaaagaggtcagatttgtgggcaggcaagagctcaggaatgaagaaccaaaaaggaggctctcaacccctctccaaggccagacgctctctgtactcccattaacttcacaaccaagtgcagacgctcggtgagttcagagaccacttggttagccctgccccacccctcctggtgtgacctggcactgggaacacacagattgcagcagaaacctgttggttccatttgcactcagagcaaaccaagcagcaccttgattgccacttttcctccagccactctgtcaaaatcaaaactggttgcctcaccagccctggtgtggcatggcccaaccatgtccctgccgccccacttaaatggccagagaaaactacatggtgggtagatgaggttgaagccttgcttggggaagggacttgagcacaggagaaaggcttgagctccacaactgcccatttgctcagacaatggagcttttctgagatcaagtgctccccaaactacatgggagtagccccccgtggtctgggcaggctggctgagagaggtctgtgctctcaggtaaaaggagagaaggaagctgggtcaagagaccctgaagaggagggtccgtgtctggagtgaggggaactgagccctgctggctacctgacctgggtgggctgctggctttgccctggaagacttgactatgtgggccttcatgtgtctagaggatttttcttctccagcatataactaccttgagaatggatgtgatatgtgaaaatttaaatttaatacaaaagcacatctgcaaatggtgagtcaaactggtgaaatctcccaggtaaactctgagcaagaaaaaagagaagatgactttaggaaaatcctaaacgaggtttggttttaaaattttcttcttggctggctctcctctcctgcaagttgcctttatccacttggggtgtgatatctgaactgaaaaagctgcaccaatctgaggatattggtccaaaaagagacaagagaccacgaggctcaagcagagagcatccacacagcatccaaccagaaaggccagtgtccttcctccatgaaaggcagccagggacagatgtcccagagccaggagagagagggagagaacacaggacctgcccctaggccactgactgagcaggataaaacccacaagggcac

SEQ ID NO: 94662 - DNA, 13283 bp, Homo sapiens
gtagaagcaggcccttcaaggattaaaactcattataaaaaaccttagttttaaaaagggtgattatcccctactacttctccatttagcagcccaattttgcctatgctcaaatctggaaatatatatatatatatttatgtatatacattttaatatagatttatatttttgaatatatttatatattttaatatataaatgtaatatagattttatctctattttaaatatataaatgtgtatatatggtaccctgtgatggatcactacaacttaacattgtgatcccatccattagggccccatacctaatattaaaattaaactgattttattcaatcaacaacaataaatactttactcttacagatgcggccaacctgttatttctgtgcctatttccacagcccttcaggcagtttgcctctgcctctgaaggcacacaatacacttttccaggcaacttgcagggggcctccacatgagggccgtcatcacacactgtctttacagacaagatgcaccttctccaggagcacaggtacgatactgcacctggattccagtgattctcctgcctcagcctcccgagtagctgggattacaggcacccaccaccatgctcagctaatttttatatttttagtagagaatctcctccaaggatattcactggacccacactctaaggacatttgagcttaaagaggaagcaggcagtcactggtggctaaggaagcctgtagctgccctccccctcttcaccttacccctaaggaggaggggtgatgtcatggattggtcagattcaagagaactgaaccacaggcctgcgtggaacctcagtgtgtgaagtaaagggattaaaggctagtctcaggctggggatggctcctgtctatttcttctctctcagagactgcaggtaagctgggggcctgggcttcttcctattgggaaggaggtacatttttccttcttcgcattcccctctaatcagagtgccaagcaagaaacagggggaggccaaggggagaggaatgaggacagaattgcccctattgcacaggtccagtgcagaccccagggctcagggattcatgctgggggttggggccaaggccctaatagctaataaaaggtttctttgccttttctgctatatgaatattctgctatacgaatattcctccaggaataccctgggatagtatggaatgggtgggtggcccaggaatctgtgttccagctagctatctcagcatcaaaccagaggagggaatgaccaaagtagttcctgggaaaagaagagggacaattcctggccaggcgagatggctcatgcctgtaatcccagcactttgggaggccatggcgggtggctcacctgaggtcaggagttcgagaccagcctcgcaaacatggtaaaacctcatctctactaaaaatataaaaattacctgggcatgggggtggacgcctgtaatcccagctactagagaggctgaggcaggagaatcacttgaacccgggagcctgaggttgcactgagtcgagaaaaagaaaaagaaaggggaattctaggcagagtgaatagcattgcaaaggcaagcaataaatggatgtgttaatatgtgtggggcaataaacagagtgagaaatgcctgcagttagaggatcacagaggaactttataaagcttataaagaggaactttataccatactgtgtgagaaggctagacttcatccataaaaagatggtctcctgtgttagccaactgctaatgttattctggtgcctactacatgccaggcatggctctgaatgccttacatgaattaactcatataattctgagacactgagataaaggagttgcccaaagtctcacaaacaaggaacctgaggttcaaagggatggagtaagtggcagatttgtcctctttaccaaacttgctactcaacagccatgacatcaacaaggagacaggttatgttgacctggacttaccgtgaggtgagctggaggaggtggtatttgagctgtgtcctgagagacaagggatcagggccagcagaggctggcaaagtttaaggtgcatgggctccaggatgcctgatgaaaaagaaccatagagagaaatgcccaatacttcacagcaagtcaaagccctcaggctgcacagtgtggcatccaagaacagaggtgagcgagccagcaccgcccttgggaacagggccttgcccaacaccttttcctttacatcagaagttggctgtgatccaagatcttctatccgttttatcagagtaaacgcaaacttctttgaaacaagatttattgttacattaagaagattatttttctttccagaaatgatgggggatgcttaacttttttaactagtatttgtgtagcacgttaacataaacaggattctctccttatttcattgaaaaatgaatgttaactttctcaatttttcaaatgaggatattgaaacctaggagattaactcaggaaagaagctggggctcaaactcagttattcagactccaaattctgttttcattcatttttttattctttcattcattgaaaaaaaaatattgcattccccaaatgtgccaggcacaggactgcgcactgagtagacagttgacggtaaaagagacatagcttatctcgcaagccctcttctcacagtgcctctaacacagaagcaggaataagtgaagagcaatatactatataatactctagtatttcttatcagcactcagtgattacatccacacttttgcagggttctcacacttgcatttgtagttcactgctcccattctttcactgaatgcctgctttgtgctagacattgtgtatggactgtaatacacaagcaatagggttcggtgcgataacacctatgtgcaaaatacctggaagtatttattgagcacacactcttcgaaaagcagtctttcagcaaatatttatcggcaccttgataatcctaacagcttatatttactgaatactatgtgccaaggaccatagtaaattctttacacacattatcatttggtcttcacagtaactcttcagaggcaggtatttgagagcttaagtcaacgtgctcaaaatcacaacactagaaagcagtggcagtggaatttgaatccaggcagccagcatttcctactactcggctgtcctaacctcccaccctatgcagggtgctggtaatacaacggtgaagactggtgtgatccctatccttaaaatgcttacagcctaggagggaagataatctttaaacaaatcacatgctgagaatgtctaacagggtacctggtctcctttgggcttcattcaagcttccccaagaatatgccttgtcaagtggacccagagactgagttcttaagtagacagagcagggagagagacatcaatccaggcagggggacagcacaaggaaaagctctgaggtagcaagaggtctggcagtctgaggctgtcactgggctgagggcaaggccaggtggatcacagggaagctaaggaaaagagcatgaggagcggcataaatctacgtaattcaaaggtttttccagctgcgggaggggagaggtcggccgagagcaagatggtgtgtagagacgccaagcaggacgctacttcatgtgaggcgggaatgttagtttggatcaacctgttgatagagggaatggaagcaggtaggttgatgaaaaatgcagaagagagaatcaacggggcttgggtggggaaacgaggggaaggagggagtcaagcaaggttttgggcttgaacaacccaggggatggcagcactccgggacagctcgggggaggaagatgagagttcaagtagcatccaaggtggctgtggacagccatatggagctgttaagtcaggcggctggatggacatgtggctctggagctcggaggtcctaacagtgaaggagaccatcttggacaaaggtgaaatgagtgtctaagtcagagccctagaggccttccactattaaaggttattattagagaggtcaggtgcggtggctcacacctgtaatcccagcactttgggaagccaaggcgggaggatcacttgagcccaagagtttgagctcaagcctggacaatatggcaagacactgtctctacaaaaaatagaaaaaattagccaagcactgtggcacatgcctgtggtcccagctatttgggaggctgaggtgggaggatcacctgagcctgggaagtgcgggctgcagtgagccacgatcacaccactgcattccagcctaggtgacagagtctgaccctgtctcaaaaaaaaagaagaaggagaaaggaagaaagaagaagaagaagaagaagaggaggggggaaggggagggggaagagggaggaggagggggaggagggggatatgggaggagggggaggagagggataggatgggaggggaatgagtgggaggggatgagggggaggggatgagggggaggaggagggggagggagagaagggaggatagaggagggaggagggggaggaggaggggagggggagggggaagaggaggaggaggttattagagagggggaactgagcaaagggaactgagaaacatggtcaaaaagaaaggaggaaaggcaggagagcgtagagtctgttttaaggagggagaaggaacggggcacagtggctcatgcctgtaatcccagcacttttcggggctgaggtgggaggatcacttgaacccaggagttcaagaccagactgggcaatatagtgggaacccgtctctacagaaaaaaaaaaaaaaaaatttaatgacccaggtgtggtggcacgctcctgtagagcgcctcaactactccaaaagctgaagtgggaggactgcttgagcctaggtggtcaagactgcagtgagtcatgatggtgtcactgcactccagcctgggtgacacagcaagaccctgtctcaaataaataaatagccaacggtctgagatgcagaacctgatgtgactgaatttttagcagggcacagttaaatacgggaaaggttgttctgacctgggattcgtcctgggggtcttcataaaagccaggcctgaggtgcacctgggcaggctacatgcaggagagggcctgaaggtgaatgtttgggaacagcaaataataccagcaggtagaatgaggaggcagagctagaggatgccgtggagatcatctcacccataaggtcatatcacccgtgtcacccagtcactggccacttcatactcatttcatgctcacaacagccctgcagtaggaattcactaacccttcgtcacagatgagaacactcagacccagccatcggaactgactgttcagacggtgcagatggggaagtggggatggcagaattcggctctgggtctgagttcagtgctatcacctcatgcttcctcgactcgggaggcaacgaggggaagtgattagagatgatccgagctggacagaggcggagaggagggaataaatgagagggatgtagggcgcagaatcaacaggatgcggagagcaggtagcagctgagaaggacaaggaagaaggctggggcttctggctggagtagtcaggtgaacggaggtgggaacagcagggtatgggttcaggggaagatggagactcagacgatgagtccactgggcctatgtgacgggttgtggggcggtgttgtcaggaggcaaagagagactcaaatctgaaggtcagaggcacggtccggagtgtgggagaccagagaccgtcagtgtaatcttggattttgattcctttttaccacttaacagcagagttgagaaggggctggagctgggttctgggagagaagtgacggggtacgggtggtgtcctgccggtgtcaaagacgacttccggctcacctctgactcggtttcccccacagatggcttttccctgccgcaggtccctgactgccaagactctggcctgcctcctggtgggcgtgagtttcttagcactgcagcagtggttcctccaggcgccaaggtccccgcgggaggagaggtccccgcaggaggagacgccagagggtcccaccgacgctcccgcggctgacgagccgccctcggagctcgtccccgggcccccgtgcgtggcgaacgcctcggcgaacgccacggccgacttcgagcagctgcccgcgcgcatccaggacttcctgcggtaccgccactgccgccacttcccgctgctttgggacgcaccggccaagtgcgccggcggccgaggcgtgttcctgctcctggcggtgaagtcggcgcctgagcactacgagcgacgcgagctcatccggcgcacgtgggggcaagagcgcagctacggcgggcggccagtgcgccgcctctttctattgggcaccccgggccccgaggacgaggcgcgcgcggagcggctggcggagctggtggcgctggaggcgcgcgagcacggcgacgtgctgcagtgggccttcgcggacaccttcctcaacctcacgctcaagcacctgcacttgctcgactggctggctgcacgctgcccgcacgcgcgctttctgctcagcggcgacgacgacgtgttcgtgcacaccgccaacgtagtccgcttcctgcaggcgcagccacccggccgccacctgttctccggccagctcatggagggctccgtgcccatccgcgacagctggagcaagtacttcgtgccgccgcagctcttccccgggtccgcttacccggtgtactgcagcggcggcggcttcctcctgtccggccccacggcccgggccctgcgcgcggccgcccgccacaccccgctcttccccatcgacgacgcctacatgggcatgtgtctggagcgcgccggcctggcgcccagcggccacgagggcatccgrcccttcggcgtgcagctgcctggcgcacagcagtcctccttcgacccctgcatgtaccgcgagttgctgctagtgcaccgcttcgcgccctacgagatgctgctcatgtggaaggcgctgcacagccccgcgctcagctgtgaccggggacaccgggtctcctgaggccagttgggcggcttcagccccgggcctccaaccatgtccatgctgagaaggcagctttcccgctctgggtaccttacgtcctgcccagctctgtgcacctgaaccccagctgcgcactgaaatcagctggggtggggggtgtggaaaatgcctacatcctggctccatctcccgaagtttcgatttgattagtctggggtggacccagacatgttaagtattttttaagttcctccagtgatgcgaatgtgcagctaggcctgaggaccactcggctagactatctcttcatcctcgcaaagccagctccaccgccctctctgcaagaattccgggcccctcgctcccacactcgggtcctcttgagcagtggagcaagggagacctgggagcgtgggagccaggatcagcgccccctgccatgtgcctacaaatgtcagttgtgatttccactgtttacaagtgagtggagctggagctgggctgacagtgtcaggtggatcccgcttccccctcccccaagaagtcagccaacacgcagctgaggcgcatgtggtggccttcttcccaccactaccccagtacaccgtgaggtagaaatcttcaccgtgcaaagtggaaaccagaggcccggtcagacagtgactaatccagggccgtggcattcccagacagcacaccactgtggtcccctccacactcaccccaaccaaagctaatggcctagttgggtcctgcccgccaataatcacccccacgggtcagagacaggctccttgccggggtctgggcctcaggctcagtgggccttggacaacccagcagggagttccggggagtccgaagtggagaaaggctggtgggaacatggaggccagtgttggggagcctgtggaggcaggtgtgtagaattgtgttcgggaggtgggggatctgagaccgaagtggacagtggttaagattgtggggccgggcgaggtggctcacgcctgtaatcccagcactttgggaggctgaggaggtcggatcatgaggtcaagagttcgagaccagcctggccaatatggtgaaaccccgtctctattgggagtacaaaaattagccggccatagtggctcgtgcctgtaatctcagctatttgggaggctgaggcaggagaatcacttgaacctgggaggcggaggttgcagtgagccgagatcgtgccactgcactccagcctgggcgacagagcaagactgcatctcaaaaaaaaaaaaaaaaaaggagagtttgcaagggtgggtgggaacttggtgcctggggctctgagaaccaggctgtggtcctgacctccagcagctgccagtcatcttggcaacatagaaaatcaaggaaacggcctaaaggcaggcagaagtgtgtgtcagcaaggtcccaactatgtaagatggacacgagggactcaccttcagggaggaaagagccagggcagaacgtcaggagactggccaaaggtccttccctgccttcaggacgaagactagactcctcagtcctgcatttcaggctcctgccacccgcctgctgctcactgatccctccctcccactgtcggcctccatccaggtggcagtgcctgcgctttgtcaggctctctcttgtctctgcattttgcacaagctctgacctagttaccgaaatgtcctccaaccacctccatcctgcatgtctcttgcaccagttaggacgcctgtcggggaagctgccagctgcccacctgagtcggctgttcccttcctcctgggcactcacctagactccatttcccagcactccgtcccctgaagttagatgtggccctgtgactaggccctcatggatggacgggagtggatgaggatcactgtggcacctgggcctgcttatgctctcttcctccttcccattcgctggaacatggatgggcctgggacccagctctgactttgcaagtgaggacaatgctccaggcccaagtggaagtttctcaactactgacatttggggcaggacggttctttgttgtggggggcagtcccgtgcattgtaaaacattcagcagcatccatgtcctccactcactagataccagtatcacagcccaagtcatgacacccaaagtatctccagacgttgccaaacataccctggtgggaaaattcaccctagcagagaaccgctggcctagaggaaggcagagaaacgaggattcctgagttcctgcacggagcagagcagcccggggaccaacctggaatactcagttcagactactgaggaagacaaaataaacttttatgcttttaaaaaaaattatggacagaacaatatagacaaaaacttttatgatttttcagcttctggggtttgtctactgttacagcagccttgccctgctagtgttttagtctgttcaggctgctgtaacaaaaataccataaactgggtgtcttacaaacatttctgaaagttctggaggctgggaagtctaaggtcaaggtcccagcaggtttggtgtctggcgagggcccattcctcactgccttcttgctgtgtcactgcatggtgggaggggcaagcaagctcccacggcctcttttacagcggcccagattccattggtgagggttctgccatcatcacatcatcaccacgtcaccttcagggctaggatttcaacgtaagaattccggggggccgggcgtggtgactcacgcctgtaatcccagcactttgggaggctgaggcgggcagatcacgaggtcaggagatagagaccatcctggctaacacagtgaaaccccgtctctactaaaaatacaaaaaaattaaccgggcatggtggcaggcacctgtagtcccagctactcgggaggctgaggcaggagaatggcgtgaacctgggaggcggagcttccagtgagccaagatcacgccactgcactccagcctgggcgacagagcaagactctgtctcaaaaaaaaaaaaaaaaaaagaattccggggaaacataaacattccaaccatagcacttaagtcacctgctgtgtcccctttcatcccttgtttttcaccaagtagactggctgctcccagagggagaggccatgtctgatttacatcagggctgtcacagatttacacagagggaatccgtggcaagtcccatcactcccactcctggaacttgagtaggtcatctcacctctctgagccgctctttctgataagatttggctctgtttccccacccaaatctcatcttgaattgtaattcccacatgtcaggggagggacacgtaggactggacaggcgggaggtgattggatcacggggtcggattccctcacgttcttgtcgtgatagtgagttctcgcgagaggtgatggttttaaagcacggcacttcctcattctcgcacacacgccctcctgctgcccatgaagaaggtgtctgctttcccttcgccttccgccatgattgtaagtttcctgaggcctcctagccatgcttcctgttaaatctgcagaactgtgagtcaattaaacctctttcttttataattacacagtctcaggtagtattctttataggagtgtgaaaatggactaatacactttccacagtgatgttccatgccagggccatgtaaatcctctgtaaaccacataggagggtactgtcattctgcaggcttactggcagctctgagaggttgaaggaagcaggaggaggtggcacttctgtgacctttctgcagcccttgccgtgggccttcagtagccacagccacttgtcacttgctgatctattttctgagcaggccataacaaatactcctacatgcttttggggtgaatggatgagtggatgagtgccatctgtcccagtgatgtggactgtatctgttaggacagcagtccccaacctttttggcaccaaggactggttttgtggaagacaatatttccacagaccaacgtgggggatggtttggggaagattcaagtgcattacatttattgtgcactttatttctattattattacatggtaatatataatgaaataattatacaactcaccataatgtaaaatcagtggaaaccctgagcttgttttcctgcaactagacagtcccatcgggggtgataggagacagtgatagattatcaggcagtagattctcataaggagcaggcgacctagatccctcacatgcgcagttcacaatagggttcatgctactatgagaatctaatgctgtcgttgatctgacaggaggcggagctgaggtggtaatgcacgcgatagggagcaactataaatacaaatgaagctttgctcacctgccgctgtgcagcccggttcctaacaggccacaaccaataccggtcattggcccagggattggggacccctgtgttaggatactgtactagttccctattgctgctgtaacaaattcccacaagcttggcttaaaagcacactcatctgttaccctacagctctacccaccaactgcactccttactggaggtgctagggaaggatccatttctttgccttttccagcttgcagagacctccttcctccatctccaaaaccgaccatgtggcggctcttggtgcgttgcttccacagccacatcactctctgactttcctgccttctccttccacttccaaggaccctgtaactacactgggcctacctagataacctgggattcttttcctatcttaaagtcagctgatgagcaaccttcattctacctccaaccttacttctctttgccatgtaacatggtgacatgccacatgtaacattcttatgtaacatgcatcagtcacaggttccaggtattcagtagggtatgggcaactttttgggcggccgttattatgcccaccacagtgcccagtcaatatttgtggaataaatcaacagtaatgaaataatgcacaaaaatgaatcaaacaagggtgcttcttccacacagacctccatgatgcgagctctcattctggactactgagtgacattaattctgaattccctgcccctagctgccatttgtcaagggcttgcaagaaacaggaaaacaagaatgctgaggccagaatgcggacaggtcctctggaaggtccgaattgtgctttgacacaaaatcacacaaaaaatgcttttacagcctcctcccatttccctgacagacaggcggattatccccattctattcctagagatgaagattcaggaccttgccggccccgagactcaagaagccgccgttatgggtcggctgggtgactctgggtcctggccacccggtctctgaagctgggttgcacgcgtgtccaggtccacggaaggctgcagtacccgcgcagccccggcatcacctggcgtcaccyggcgccacctggcgcatcgctccccacggcactggcccggcgctccccgctccgctcgttcggctcatgcggcccgcggccgccagggggcacgccccgcaccccgcaccccgcatcccgcacacacgcgcactcagcgaagcaaccccggagcgcgatcccccaacgccccttgtgagaccagcatgactttgacactcaaacccctcaaggatcccatgagcagggaagatgatgcgcctgtctcaggaacctagatggaaacaaaaatcttacacaaaatgctagcaggcgaaatgcgatgacatgtgaaaaggagatctatcaggacggaggtgtgtttatactagaaattccagaggggcttagcattagaaaaacagccaaactacataaataagacaggaagatccgtcaatgaggtacattatatcaagagaaatatgagcatttcagaggcaatgtgaaagacgtttattaaaattcaacatccattagtgattttaaagaaaatcttagtaagaggtgaaagcatttgacagcattttgcttaaagttaggagcaaatgagatatacccatcatcactacttctgttcagaattgtccagaacttgagagaacaccaagacaaaaaaagatacagaaatataataattggaactagaggaagaactttttca

SEQ ID NO: 94663 - DNA, 12246 bp, Homo sapiens
gggactacaggcgtgtgccaccacgcccagctaattttttttttttttttttttttatgacggagtctcgccctgttgtctaggctggagtgcaatggcgcaatctcagctcactgcaacatctgcatcccgggttcaagtgattctgctgactcagtttcccgagtagctaggattacaggtgctcaccaccatacccagctaattttatttttgtatttttagtagagacgtggtttcaccatgttggccaggctggtcttgaactcctgaccttgtgatccacccacctcagcctcccaaagtgctgggattacaggtgtgagccatggcacctggctagaaattcagttctttttaaggctgaatactatgccaatgtctggagagtcagtaaaaaaagtcctctgaaatctcttaatttatagaaagctgaaaaccctagtttatattatacaggaactctcacacactgctaatgggagtgtaaaatgttacaggcgtgttggaaaatggtttggtaggtttttttttttttttttgagatggagtctcactctgttgccaggatggagtgcagtggcacaatcttggctcactgcaacctccgcctcccgggttcaagcgattatcctgcctcagcctcctgagtagctggggctacaggcacacgtcaccacacccagccaatttttgtatttttagtagagacagggtttcaccatgttggccaggatggtcttgatctctttacctcgttttcatgcgcgtccctgtgaagagatcaccaaacaggctttgtgtgagcaacatggctgtttatttcacctgggtgcaggcgggctgagcccgaaaagagagtcagcaaagggtggtggattatcattagttcttataggttttgggataggcggtgaagttaagagcaatgttttgcgggctggggtggatctcacaaagtacattctcaagggttgggagaattacaaagaaccttcttaagggtgggggaaattataaagaatcttcttaagggtggtggagattacaaagtacattgatcagtgagggtggggcagaaacaaatcacaatggtggaatgtcatcagttaaggctatttttacttcttttgtggatcttcagttacttcaggccatctggatgtatacgtgcaagtcacaggggatgcgatggcttggcttgggctcagaggcctgacactcgtgatctgcctgcctcggcctcccaaagtgctgggattacaggcgcgagccaccgcgccgagcccagtaggttcttataaagttaaacattcacatgccatatgacccagccattctgcctttagatattcatccaaatgaaataaaaacctatgcctataaaaagacttgcacaagaatgttcacagaagccttattcataaagctccaaacaggaaacagcccaggtgactatcaacaggaaaactctccctgtttttttgtttttttgagagtcttgctttgccccctaggttggagtgcagcagcacaatcttggcttactgcaacctccgcctcccaggttcaagtgattcttgtgcctcagcctctcaagtagctgggattacaggcatgggccatcatgcctggctaatttttatatttttaatggagacatggtttcactatgttggccaggttggtcttgaactcctgaccttgtgatctgcctgccttggcctcctaaagtgctgggattacaagcatgagccactgcatccagactctccttgttgccttatttatttgagacgcagtctcgctctgtcgcccaggctggagtgcagtggcttgatctcggctcactgcaacctccgcctcctgggttcaagccattctcctgcctcagcctcccaggtagctgggactacaggcgcctgccaccatgcctggctaatatttgtatttttagtagagatggggtttcaccatattggccaggctggtctcgaactcctgaccttgtgatctgccaacctcagccttccaaagtgctgggattatagttgtgagccaccgcacctggcctgcctgttgctttaaggtaagtccttgcaggcctctgagcttgggcattttaatttacaaaaccatgcgatccctggctgtcctccctggtaggtctgcaggaactacagctctgtgccagctgagcactcgaccctctcggaagccgtatttagagccatcctaccaccctgtgctgtgccataaaacttggctgtgggctcttctgacctctagagaggcttcttgaaacaggaggccttatagggggatgtctgcttctgaactatgtaaatcatgtggcaggtactaagattcacaaggctgcacttaagctcttaaacggaaacctttatccactgaatcaataacaggaaaataatcagaggctgtcaaaatgataaagcagcagtgaggcctagagggaattattatttctctcaactgtgtaactatttttgtaagcattacaagcacactgttatggagacggctgattcttcagtggagagacctgcctttgataatgagcacacggcctgatgtgatcagtaaacattcctctggaaacacttgccactttgggaagtaaggcagcccactgtttgggtgtaggaagcctgcagaaccgcatctgagtgggtccaggtaagtccccaagctcctgcaggcctgcttctctctcggcggcagggcggagatgcacggtacctactttgaggctgaggattcaatctctgaccacacaacgcacagtccagtccgcatcatgcctgacacacagcaagcactccataaacacgactaccgttattcatttacaattaaggaagaaagaggtaagtatgcttacctgaccatgattttcaaaatcattttcaagccgaatccaagaatctgatgagtgtgaagacactggaagaacctgatcacgcaggctcctttctcaagcaccccgatgcccgcaggtgaaggggcacatgccaaggacaagcccgcctcagccctggacatcgttcatcgcgcgagtgagcaatgcttgagtgagaaacctgacagcggtgtccccataacttccaccgcctctggagccacccggcaaaagccagcgtctgacaatccttcagtaatagtgaagacacctgttatattgctgtccagccaaaagctccttgttgcaggatgaacagccccagttgtttcaaacatgccccacatctcatggcctccacacaggtcgtattaaacacctctaacagagactgcacgccaagtgtggctcctcaaagaccttgcctggggactctgccactgatggctgcgacctgcacactcctgagagctccttcctggaactgcctcatttctctcatcatccttgattttttgagatggagtctcagtcttgctctgtcacccaggctggagtgcagtggtgcgatctctgctcactgcaaccttcacctcccgggttcaagtgattctcctgcctcagcctctggagtagctgggactacaggcatgcaccaccaggcccagctaattttttgtatttttagtagagacgaggtttcaccatgttggtagggctggtctcgaactcctgacctcgtgatccacccgcctcagcctcccaaagtgctgggattacaggcatgagccaccacacccggccatcatccttgattttatccaaaaatggtattaccctagtctgaatatcacatttaccttttttttttttaatgagatggagtctcactgttgcccaggctggagtgcagtggcgcgatctcggctcactgcaacctctgcctcctgggttcaagcaactctcgtacctcagcctccctagtagctgggattatagaagcctaccactatgcccggctttttttttctttctttttttggtatgtttattagagacggggtttcgccatgttggccagggtggtctcgtactcctgacctcaagtgatccacttgcctcggtctccaaagtgttgggattacagtcgtgagccaccatgcctggccacatttgccttctgatgactctgaaatggttctaaaaataaaattcaccctgcaacaatgatttgttgtgcctgaacgtatttaaaaatgttaaggtagggcatggtggctcatacctgtaatcctagcactttgggaggcccagatgggcagatcacctggtcaggagttcaaaaccagcctggccaagatggcaaaaccccatctctactaaagatacaaaaatcagccgggcacagtagcgggtgcctgtaatcccagctactcaggaggatgatgcaggacaactgcttgaacctgggaggtggaggctgcagtgagcccagattgcaccactgcactccagcctgggtgacaaagggagattctatctcaaaaataaataaataaagtaattaattaattaaaaaacaaggccaggcacgtttagtttcttaacaaaagttaagaaactaaaatataaaaataccttttggttaacttttaaaactatctctgtggagaagccttcctaattatgacatgaaacctagaagtcacaaaaagataaatttttggacacgttctatcataatgggataatttccttaataaataaagatctacaattaacaaaaaaatgatgacaatcttatagaaaatcggcaagggatatgaacagatgtttcacggaaatacaacttagatatacccgatgaattagatccatgcatattaaaactaccagttatcatttttttaaatctgccagaatggcaaagattaaactggctgtagctgttaggacatgggggaggccagcaccgatgcttgtccagtaggattgaaggcaacgtggcaacgtctgcttatgccctgaaactcactgccctgggatcctgccatccaaacacggggactgcaggactgaggcagctcagtgggcagcaatgggtgctaagtgatgtggggtacgcgggctggggtggcatgtggggcgtgtgagacctgtctgagcttgtcaatacacacatcctgagggaacagaattttcaagcaaccctagtttgcttcttttacgatgtgcacgtgtagctatttttgacaaatgagagcctacttcattatcacaaaagacactcagagagaaatgacttgcatactttgccgggcccagaaatattccatgacttatttggtgcacttttggaaaacttccagttgtttgcctttttcaggcatgaggtcaccgaccttctttaaatggaccaaattgattttggctttaccttcatgcgtctgattctcagcctccggagttctttaaatatttaagctggtggatattatggaagtaaaggcgctggcggggacccagcccaggcgggagggaggaaactgttcctctttttgtcttttgtcctttcctgctctgtgcaggcctccaccacgtggctccatcagcattcgctgcagccctgggaggccctagggccagatcctgtcctcctgtgacagttggttgtggggggcttcaggcacaagcactcgggatgtgggctggtctgcagtttccctggcatgcgacacctttgggacgcttccagaccaaaaccagatccttgctgaacagaatgacatggggacttgcagctcactcgaggttatgtgcccaggcctcacctggccgtgctgtgggctgctggcctggcacaggaggagctgtgctcaacagacgctgggagggccggggccaccagccagacccttcaccagccccagcccccaggggccctccactgctgtgtcctcgagagggatgtcgacaggactggaaatacgccaccccctttggcagcttttctaaggtttagtaaacagggatctcaggtgccaggtgggcaaatgctactgtcgctcaacgagaggaatcccagagaaggagaagcccctgtcaaccttttattgggagtggaacacatgaggttcagctcgtgccgggcactgtacattcactgaagcagctcaaggggctcagccccgmcactgacgccacactgagcaggatgcacggcccggggctcacactgtccatggaggaggtggggtcagcccgaggtgggcggatggtggcccgagacaccgagagcttggttctgggactgtggctcagctgacccgtggcacagctgcacctaagacatggccctggctaggcgggaacagctcacagtagcgatacattcacaggacacagttggtgtccagaaaagggggctcagaacacagtttctacacaagcacttggcacccacacgacagagacgtcactcaagcagcacagccacaaatagtttacagcagctcatgcccggcatccgcccatgctgggagactccctgaaaggtgggcacctgccgtctatgaggaggtgtctccctccatcattaaccccaaaccacacaatgtgtgaggagagcaggcctctgggtgaactcacacattcatacccaaggaagaggcaaacacactcaagtccagagttcccagtggtgccgcccagacctactgtcccgggggtgttatggctgtccctcggcttccccagagcagccaggacagcctgcaccgcctcccagactctcgcaggaaggggagctctgccctggggaggaaactgacaggctgggagacaagactcccatcgcagggacatgcacagcagcagccacagccccgcggacggggcatggggatgggacaggcagggagccacactgccccctcagtgtgtgcctgtggttctgtcctggtcctgcccacttggagcccaggcagacaggtggcattgagcagggcccaggtccagacagccctctggccagatgtgactggaagaggctgatgccagggcagcaccaggccttctgcaagtcccagagccagtgtgcagaaagtgccagcacggcctgtgctgtggctcctcaggatgaagtcacgtccaggacaggagggtttatgcagacacacagacactgctgacggggacagggatggctcggccactatgaggctggactcttctgtctgttcagggagtcgatgtaatgaaaaatggcccccagagcccagctggtctcaacattgtcaattttccgagtgagcttgaaaagacagagagggagaggggaccatcacacagacaggaaagccttgtgcatcaggaggctgtggctccttggaagccagggatgggctgggggacatgaccccagcaactggagaagtggttctaggcccctcactccataaaggggctggggcgtgacctgagggcacccttaccttcagcactttgctcctgggaaagccgaactcctggagtagcaggctgacgtaggtgaggtccatgcatgagaaggggctgctctgcggctgtgtctccagggtccgacacactggggatgagacacgtcccttcacgctccaggtgactcccacctgggggcggaggggcaagtgcagaccccaattccacccactacaggcacccgctggctccgcactccggattcacagacaaggccgcagctgagcgcagaaggcacccagtgcacagcacaggcaggtgggcggcaaccccggctgccactgggtctgggctccaaggggatttgcacgcctggtgttagggtcatgggccaatgtctcccaagccacatttctacatctaagaccctggacacctctcccaggtgtcaagctgcataaaacctaagctttctggggaaagaaaacaccaaagccagctcagaacaatccactcctgctcttgaggaaggacaaatccaccaagagctgtcctgggattctgctcaaagccttttcctgctgtagttgtggatacccagtgtccatgggcacaaatgggaaaatgacacaaaagctttaaaaaagccacttttgggggaggggaagggtagtactttttctggaaagatgtacaaatttgagctctttggacccacacattgggaagggcaaccaagagcaggacatgttcaccaaggcttggctgctgggccaggcgtgaaggagacagtggagaggcatagtgtgtggcacagggtctgctgggctggtcacctgcgaccccggggacagccctccaccccacatcccaggctccattctgtagggccttggcttcttaagggttgtgtgacaatcatgaacttactgggacatcccaggggaaatcactcttggggttaccctagtagcagtaaaatggcatctgaggaagtggaatcgagggacccagttcctcacgaccccatgagggtgggacaaggacggtggtcctttctcagctggggccgaggcccctgcctgtggccattgtttaggaggggctacacccaggagagtcagggccagcgcctgcgtcacgagcatcacggggcgcctgcccctgctgagatggcccctgcagcatcactcaccgtacttggctgcgatctcgaagtcccccaccaccaggctgcctcccttctccgcatctgtgggagacacaacacccagtctgcaggagcactgtgaggttggcgatgccactgagacgtgaggctggcacggggaacgccagcccaagagccccaaggcactgactggcttctgaggcaggccctccagctgtaggcggcactcacgtgctctgaggacggcttctgggtgatgtggtgtggggtgggtttgggggctgagagggtcaccccacaacccaaccctgcagtgtcccccgagaaagctcaccaggaacccaggaccccaaattgagtaaaattttaagttaagaaaaataaaagtagagaaattgaaatgtttcctgaagccatagaactgagctcagcaacagtattctggtatcagtttcctaaatgtaaaaaaaaaaaaaaaaaagttcttgaaaaatacactgaggggtggtttattggtggccttccaccttgaccacccaccttccacccaggcccagtcagtggtagctttgtcagcacagagacccgccggaggctgcagggcccagagagccggcaccgtgtcagcttatttaaaacagtagtgttcttatccgtaccacaggccatacattctgatgatctcaccatgatagtgactctgcaaccccctccagagttcccacacagcctgaccaccactagcctcagcaaactctgaatacctttttccgccctaatctggcttcctgggctgtgcagggtgagtcagagagactccacattcagtgagctgatccctcccatgggtacagggcagccacctgcaggtcacaggaggcctcctgtagccagggctgcagggtagggcagagtggctgagtctgagacaacgtgggccagtgcaaggcaggacctgccttccagcaggaactggaatcaacagcaagtcaccagccacgaggttttactgaagggctcaaagaactgatcttttcctactcaggatgagacgccttctcaaatctgcttctggcctcctgcagggatgtgacaacagggttgcttgcctgccaccagccctctgcctcggggagcacacgccctccacccccgccccctgccgccccgaccttcctgctcagcccatccgggcccccttacctatgaggcccacaccagctgcaaggtcgtaatagtaggagaaagcatagaagtccacatgcttcacttcctccgtcctgtgcactctgttttgaaggacctctgacactctggcagcacacagctcgtgcaggcttgccgctggggacaagcacaaggctagcggtcagtgggctccgagcacccaggcctcacagctgcttggggcccctcccaggggacttgagactctgacctgaattgtcaggaaaaggcaggtccagaagcctgtaagaccccaccccaagttggggctgctccccgcacaggtcaaaagcagccctcaggagccagggcattgttggtcccggcgcagggagtgaagaccgtgggcacgaaggcagcggcagacctggactctgaggaggaagctgctgatgcctgacaccagtggcctctggcctgttgggaccatctgccctacattccccctccgccagcccggagtcccacctcctcagggggcctgcaccctccctatgtcatagataaggaagtggaggcccagctcacttgccaagctcccatggcttgagggagaacaggaacagaggaccccggaggccaatggaccgtgtggacatctgagggcgcctctacaccccacaccttgacccagcttcccggctttcccagtcctcctccaccaggccccatccttccgagtgcttccagggttcccatggtccacagacccatgctccaacccttcgatctcatttcctcctggtgtcccccaccaagccacaccacctcctcctcgttcattaaacacagcagctgacagagggccccggtgtgtgctgcttgtgcggcctggggtgctgctgcttcagatctgcgcagtttcttgaaacctcctcctgtcttagatcccatgttaccccacgaggccgtccttggctgtcctagttacagctgcgatcgccctctcagatccccgccccgtgttatttctcttggaaggctttcccgatgagcttcactgtctggctcctcctgtgggacacagctgtgcagtcctgctgtgcctgatgcggccccccggtacacgcaccagtgggtgattgacttggaaggacctgaacggttcgcgaaggcatgcacccctcatgccgagtgcccagtctgggaatggcgtttgaacatttctctcagaagaaactgcaagggtgcagagcactagagcctgcccagggccagcgggctccatagcctcgagcaggatgggtggaagcagaccctccctctattcccgcccagcacagcacagagtgcctgggctcccagtcccagccctgcatctcagccccaagctggtccagtccttcctccctgcaggcctgttaggaaatcagccctcaggaggaagcttctggtgacagtcaggggaatgttgaacagaggcagagggaaggagctggctctcagcacagacacaggcccctgcagccaaaccaccttcacttccagggcaggtacaggctcttcaaagagaggtcaggagcctcccgtggaacgtcccatgggatgtgggaaaggcaagggggagaggaggccaccactctcacccgcagaaaccaacaggcagcaaccctccccgtacctgctttctgccctgaaaccctgtacgtgacttctgcgtgttcccactctcctttgaaactgggagacaagcaagggctgaccaactcctttccatccttagctgaaacagagattaaaaaggaaagagaaaggaaggtatatcaccgccatggactagggctgagctaggagtcgcggaggccctggcttgacacaggatgggggaagctgagtggcttccaggtccactgggaaggcaacacctccctgggaagtggcagcaaagcctcgttggccaggaagcacaccgctaccaggaccatgcccagctcacggccctgggcacgccgggtgccaggcactgggccaagggctgttcagtgaagtgtgacgacagtccttttaggaggggagccatcattacccagttttataggtgactgaggctgtgagtagctggtaggttggtggcagggccagaacaagtgccaccaggtgccaccatgccttgaatggaatctgctgctccaatacacacaagctgggggctcaaaaccagcaaaggaagcgtattggtcccagggctggccccagtatcacctttcgaggatggcaggctgctgtcccaccgaaaggtgctggtcccatccctggactctggcctggacctgctttccttgatggaatgggcaggaaatggtggcatcagggtagccttccttttttgaagccaccacaaaagtgtcccaggctgctctgctggggcgaggccatgtggaagagcgcccaggtctagacagccgcccagcgacaggcacgtgcacagaccctcaggaccccagcgggggatttagacagctgccac

SEQ ID NO: 94664 - DNA, 159582 bp, Homo sapiens
atatccatttaaaacatatatttgggaccgggcatggtggctcacacttgtaatcccagcactttgggagactgaggccagtgaatcaccagaggtcaggagttcaagaccagcctggccaacatggtgaaaccctgtctctagtaaaaatacaaaaaaattagctgggcatggtggcaggcgcctgtaatcccagctacttgggaggctgaggcaggagctaagattgcgtcactgcactccagcttgggcgacagagcaagactctgtctcaaaacaaaaaaatatatatttagaggctgagatgggaggattgcttgagcccaggagtttgaggctgctatgatcacaccattgcactccagcctaggtgacagagaccttgtctgtaaataaataaaaatgaaataaaataaaacatgtatttgttttaagtaaacttttattgatgtataatatgaatagagaaaaatgcagaaatcataagtatatggcttaattaattttcacaaagtgagaaagcctgtgtactgtcagaggcttttgaaccagagcaactccatcttgaataggggctgggcaaaataaggctgagacctactgggctgcatttccaggaggttaggcattcttcattctttttttcagacggagtcttactctgttgcccaggctggaatgcagtggcatgatcctgctcactgcaacatctgcctcctgggttcaaacaattctcctgcctcagcctcccaagtagctgggactacaggcgcctgccatcactcttggctcatttttgtatttttagtagagacagggtttcaccatattggtcaggctggtctcgaactgctgaccttgtgatccacctgcctcggcctcccaaagtgctgggattacaggcgtgagaggttaggcattctaagtcacagaatgagaggggtttggcacaagatacaggtcataaagaccttgccaaaaaagaagttagctaaaacccaccaaaacaaagatggcaattaaagtgacctctggtcatcctcactgctcattatatgctaattataatggatcggcatgctaaaagacactcccaccagtgccatgacagtttacagatgccacggcaacatccagaagttaccctataaggtctaaaaaggggagtaaccctcagctctgggaattggccacccctttcctggaaaactcataaataatccaccccttgtttagcatataatcaagaaataactctatccttagaccagcatctcgagccattgctctgactatggggtagccattcttttattcctttactttctttttttttttttagagggagtcttgctctgtctcccaggcaggaatgcagtggcaggatctccgctcactgcaacctctacctcctgggttcaagcgatactcctgcatcagcctcctgagtagctgggattacagacgtgcgtcaccatgcctgcctaactttttttgtatttttagtagagatggggtttcaccatgttggccaggatggtctcaaacacctgacttccagtgatccacccgcctcagcctcccaaagtggtgtgattacaggtgtgagccaccacgctcggcctcctttactttcttttttctttttctttttttttgagatggagtcttgctctgttgcccaggctggagtgcagtggtacgatgtcggctcactgcagcctccaccttgcctcctgggtcctggttcaagcaattctcctgcctcagcctctggagtagctggtattataggcgcacgtcaccacgcccagctaatttttgtatttttagtagaggtggggtttcactatgttggccaggctggtcttgaactcctgacctcgtgatccacccccctcagcctcccaaagtgctgggattacaagcgttagccaccacgcccggcccctttactttcttaataaactcattatcggctgggtgccgtggctcatgcctgtaatcccagcactttgggaggccgaggcaggtggatcacctgaggtcaggagttcaagatcagcctagccaacatggtgaaactccacctctgctaaaaatacaaaaattagctgggtgtggtggtgtgcgcctgtaatcccagttactcaggaggatgaggcaggagaatcacttgaacccaggaggcggaggttacagtgagctgagattgccccactgcactccagccagggtgacaagagcaaaactctgtctgaaaaagaataataaataaataacttgttttcactttattgtatggacttgccccaaattctttcctgcacgagatccaagaaccctctcttggggtctgaatcaggacccttttcctgaaacagtaacaccacccagatcagggcacagaacattattacctatcctgagaggtgtctttgtgccttcttccaggtacaccctcccctcaaagagtaaccagtatcctgacttctaacaccatagactagttttgcctaaccttacatagtttttaaaattgtaggtgaatacagaatctggagctacaggacttagggttagatccctggttcctggctgagtgatcttcaacaagccatttaatttctgtcacactcagttttcttctctgtataatggtcataaaaataccttgtactggccgggtgcggtggctcacgcctataatcccagcactttgggaggctaaggcgggcagatcacaagctcaagagttcaagaccagcctggccaatatggtgaaaccccatctctacaaaaatacaaaaattagtcagtcgtggtggcatgcacctgtaatcccagctgctcgggaggctgaggcgggagaatcgcttgaacccgggaggcagaggttgcagtgagcggaggttgggccactgcactcaagcctgggcgacagagtgagactcagtctccaaaaaaaaaaaaagcaaattctcaggccctgccccagacctactgaatcagaaactctaggagtggcctcagcaacctacagtttaactaactttgcaggcaattctgataagtactgaggtttgaaaaccactgcactagagaaactgaatgaggatggggcgcaggaatctgtattttagcaatctttcctaaggcatgttgcaggaaacatgaagtggttttgaaagtactttgcttgaggcttgaaggcttgaacctaggagtttgattttttattttttttagatggggtttcactctgtcactcaggatggagtgcagtggcgtgatcttggctcactgcagtctccgtctcctgagttcaagcaattctcccaccccagcctcccgagtagctgagattacaggggtgtgccatgcccaactaatttttgcatttttttttttgagacagattctcgctctgtggcccaggatggagtgcagtagcacgatcttggctcactgcaacctccgcctcccaggtccaagcaattctctgcctcagcctcctgactagctgggattacaggcacccgccaccacgcccggctaatttttgtatttttagtagagatagggtttcaccatgatagccaggctggtcttgaactcctgatctcgtgatccgcccgccttggcctcccaaagtgctgggattataggcgtgagccaccgtgcccggtctaatttttgcatttttagtagagatggggtttcaccatgttagccaggctggtcttgaactcctgacctcagttgatccatccgcctcggcctcccaaaccatgcccaacaaatttttgcatttttagtagagacaagatttcaccatgttggccaggctggtctcaaactcctgacctcaggtgatccacccgcctcagcctcccgaagtgctgggattataggagtgagctactgcgcccagcctttatgtttcttttgttgtttgttttttgagacagagtctcgctgagtcgcccaggctggagtgcaatggcgtgatcttgggtcactgcaacctccccctcctgggttcaatcaattatcgtgcttcagcctcccaagtagctgggattacaggcacccgccaccacacctggctaatttttgtgtttttagtagggaaggggtttcacaaggctaggcgtggtggctcacccaactctactaaaaatacaaaaattagccaggcgtgatggcatgcgcttgtagtcccagctacttaggaggctgagacaggagaatcacttgaacccaggaggcgagcggaggttgcagtgagccaagattgcgccactgcactccagcctgggcgacagagcaatactctgtctcaaaaaaaaaaaaaaaaaaaaaaagagacggggtttcaccatgttggccagactggtctcaaactcctgacctcaagtgatttgcctgccttggcctccctaactcctgggattacaggtgtaagccactgaccctagccaagcctaggagtctgagaacagcctgggcaacacagggagtccacgtctctacaaaaataaaaacaattaggatagtgtggtggcttgagcctggagtcccagctactcaggaagctgaggtgagaggatcacttgagcccaggaggttggctgcagtgagctatgattgcaccgctgcactccaggttgggtgacagagcaagactctgtctcaaaaaaaaaaaaaaaaaaaaagtcactttgaaaaatgtgactttccagatggcaaaatactattttcattaggaggaaacaggctaaacagtaatagcaaaggtcactaagtattgagcacttagtcatacctctgagtctctgcctgcatagcctattatttctcacaagcaatccatgaagaaggttaagacaacggactttcacgccagactgcctgggttcttatcaagtatgtgacttagtttatatatttgtaaaatggggataataatggtatttctgtaataggtttgttgtgagaataaagggagcttggtatcagctcttagaataccggacaggccacgttggctccactaagctgttgtcatcatccctaagggcacccagttaaaaggtagaaaagggaggatttgaatccggtcagtgtaactctcaagtgtacattttttttcttttattttctttttaaccacgccctttaatgtacattgttaaaggctaagccaggccaggtgcagtggctcacatctgtaatctcagcgattgggaggcccgaggagggagtatcgcttgagcccaggagctggagaccagcctgggcaacatggcgacaccgtggccctattcccgccccatcccatccgcactccaccccatccccatctctacaaagaatagaacaaaattagtcgggtgtggtggtgctcaactgctgtcccagctactcaggaagcccaggtgggaggctcgcttgagcccaggagtgtgaggctgtagtgagctatgactgcaccactgcactccagcctgggtgaagggtgagaccttatctcaaaaagaagaaaaaaaaagaaaaggaaaagaaaaagaaaaaagaacaactaagttataaactaagctatatagcccattggttctcaaattatgatttcactcactagcagtatcactagacagcttgttggacatgcaaattatcagaccctatcctcctatgccagatcttctgatcagaaactctgggggtgggggtcagcagtgtaagttttaataagctctctaggtgattctgatgcacaccatagtttgagaatcacagtccttataggctctggtgggcggggtgttaaaaaaaaaaaaaagcctggaggtgctgggagccgctcgcgcccatctcacctggagctgaggaaaactgggatttaactgatttaccaccgcagccagctcttcaagccaggggcgggccggacggctggcgcgcaaggcctgctggggcttgtagtctagaccacttccgcgctcaggcgcctgcgctttagctgctaactcgctctagtagctgtggtcggggctcgggaccggctgccatcttagtctagggactgaggagtcgccgccgccccgagtcccggtaaacccccgtgggcgaactcggggcagttctcgggagagggagggagtccggatgagaatgttcggggagaacaagggtagaggagtgggacgcgcggttcgggaccccagagccgcggctgctccttcttccagagccggtgtctgtcgggggcgcggggagctcgggctactggcccgggccgggcggtgggggtgggctgtctggacgttcggagggatcagtgtctggcacaggcttccggaggccttcgcctcgcgggctccaagttgtgaaagggctgggccacgacgggcgtgggtaccgtccggcccctcgcccctcagccccgcctggggccactctccagcggttcggcctacgcgcggggcccggcggcggggccggcgcgggcgacgtggccctgtgaggggcggcggccgggtcccccgccacccagctggccttctcgagacttttccgagcccccagtcgctagaagggcccagcacagcggctgcctccccttctctctcccactcgcctcctccttccattgtccccccggcgtggtggtcccggctccggcgccctccccgacgtccgccaccgtcgtggcggcgccgacttttgcagacgtggagctgtcactgcccttcctccggagagtgcccttttctttagcagagaaaagaaaaaagtagccgttgaacgtattctaagggtcgaagcatgatgacatgacttttaagtggagaactcaagttttccaagacagttcccgtccgcgacagaaaagagaatcgcagaatttgtgcgcccgaagtagacgctgggcctaaagttagttggacatgtaaccaggtgaacttgtaaagggccaggaattcattatccccaataacaacgcaaccttgttttcttggttgtattcgtatcctaatcttattacattttctgccattcttccacagctacagtatacttagtttggagtgggggatggggaattgtgggatttttgccttgaaaattagtaagaccctggagccagccacccacttaggtgggttctcctgcatcttttcctgatagaattcgatcttcaggaagtatgtaaaggcagtgtatttccattctcaaaatcggctaaggaatggtttatcagttgaggtgaagttctcatggcagatctgctgagagcttgctatgtgtatttacaggtttatttaagctacgatttatttttaaaattaagaaatgggccgggtgctgtgtgtggctcacgcctgtaatcctagcactttgggaggccgaggcgggcagatcatgaggtcaggagttcgagaccatcctgaccaacatggtgaaaccccgtctctactaaaaatacaaaaaaaaaaaaaaaaaaatcctgggcgtggtggcgcgcgcctgtagtcccagctactagggaggctgaggcaggagaatggcttgaacccgggaggtggaggctgcagtgagccgagatctcgctgctgcactccagcctgggcgacagagcgagactccgcctcaaaaaaaaaaaaaaaaaaaaagcaatgggatgggtgtggtggctcacgcctgtaatcccagcaatttgggaggccgaggtgggcggattacgtgagcccaggaattggagatcagcctgggcaacatcgtgaaaccccgtctctacaaaaaatacaaagatttgccgggtgtggtggcaggcgcctgtggtcccagatactcaggaggctgaggtgggggaatcacctgattccggggggtcgaggctgcggtgagctgttaccgttgccactgcattccagcctgggtgacagagtgagaccctgtctcaaaaaataaaaaaaaaaatttagaaatgaaggtggaaattctactgcttctttgaactgtgaatttaagttttgtgagtccaaaaggaattccattacattcagcatacaggtcaagtcaccaaggatatcatatgaaattaaaaaaatgagtacagactacttcttcagtgtattctagaatcaaacatttctacattctttagaaaaaaatacatctttttcgtttgtttgagacggaatctaactttgtcacccaggctggagtacagtggtgtgatctcggcttactgtaacctccgcctcccgggttccagcaattcttctgcctcagcctccgtagtagctgggactacaggcgcgtgccaccactcccggtaatttttttgtattttttagtagagatgggttttcaccatattggctaggctgctctcgaactcctgacctcgtgatccacctgccttggcctcccaaagtgctgggtttacaggcatgagccgccactcctggccctaaaaaatacatcttttcacttattgggagaggcagacaaaccagtagtccccaaatttgaccattagaataattaggagagcttagaaattccagggtcttaccttctgagatggatttagtaggtctgggttggcttcaaccaatttatttttaacacatgccttaggtaattctgatggtcttgggaaccactgagggcaaatggtactgtagacttaccaaggaaaggtcaaaaagctttgagacgaaagaggaagtggccaattctgtgtgtgtggctgggtggaggattggttagaagaggcaagatttgcccctgaacccacattgggtcttacatgaagagtaggagtgtgaaaagggcggggaaagagaaggacagggtaggctgagtgaatgccttaatgctgtgtgtaaattcagaggattatggaacaaaaagggttcagggagtgtggagtggaatggggaaggagagcattttgaaacgcaaggtcagaaaggttaaaggaagcaagtatatgaaaagtgattttttgttgttgagactgggtctcacccagtcacgcaggatggagtgcagtgacaggacctccagagctcaagtgatcttcccaccccagcctccctgagtagctgggacaacaggcatgcattagcatgcctggctaatttttaaaatttttttgtagagaaaggttctctttacgttgcccagtctggtcttaactcctgtgttcaagtggtcctcccaccttggcctcctaaagtgttgggattacaggtgtaagctactgtgctctggctaaaaattttaagtataatgctaaaaatttggaattttatgttggtagaaatagatacagggctgggctcagtgcctcacacctgtaatctcaacagtttgggaggctgaggcgggtgaatcgcttgagctcaggagtttgagaccagcctgggcaacatggtgatatcccgtctttaccaaaaggaaggaaaaaaaaaagaaatagatgcagatttttcgacagggaaatgatgtgagtacatatgtgttttagaaaattgctgtgtactgcaggacaaagataggtatcaaaaaacaaaaaaagaaagattgctctggtgatgagcgaaaggatgagggactagctattgcagaagtctagttgagaaatgacaaagcctgaccttggagagaggttgtggggatgatcaaaggattggatttagctttttactagtgcaatattgttgccatatttctagatgaggatttttttttagagctaatctgggtaaagggctccttttctgtcaaaagaacccattagcaagtctgaataatattgccaggttatatatgttatgtatagtatgagagtgaattgttcattagcatctttgagaaattagaaagaactatgtcaggtgtaatttggaagagaacttgaagtttgttattgttactatttttgagatggagtcttgctcggccaygcaggctggagtgcagtgatgtgatctcggctcactgcaacctccacctcccgggttcaagcgattcgtgtgcctcagcctcccaagtagctgcctcccaagtagctggaattagaggtgcatgccaccaagcctggctaatttagaacttggagtttggactgaaatttatgcctctaaaaagtattgatctaggcttgttgggagtgtttttctctcagcctgtagaaacttgctcattgagttttagagttgggagaagttacagagattatctagtccataatggcaaatatattttggtttattggccagctctaattggaagctgccagaagcactgtgtttggaaggattctggttgtaggtgctctgagaaattgtattatggttgatcaatgatgtctcctgtggacagttacctagtaggtagtagacatgtgccaaatatatgctattcttagataagtccaatctcttagttttctgttttgttgttgtttgtttgttttaaaggttaaataatttacctgaaactagttaagagtaagaactagaactagaactgggttttgcaactctgggactggtattctctggtttacaaagatcaatgtgcactactgaagagcttctggtattagactagaaaaagaaaagggagatttttagcctatgcgtcttgactgtttaggcaagagtttaacaaggaattttggcctagaagtaagttttgttatattcattctgtcttaagaaatttgtgttagggccgggcgcggtggctcatgcctgtaatcccagcattttgggaggctgaagcgggcagatcacgaggtcaggagatcgagatcatcctggccaacgtggtgaaacccccatctctactaaaatacaaaaaattagctgggtgtggtggcatgcacctgtagtaccagctacttgggaggctgaggcaggagaaccacttgaacctgggaggcggaggttgcagtgagctgagattgtgccactgcactccagcctggcaacaagaatgagactctgtctcaaaagaaaaaaaaaaaaaaattcgtgttagtactgataggaaatagtcatctgttttgttgttttgccactttctttcttgttgcctaagtctctgttttgggttttggacattggtttcctttataagaattaagacaaaagtatgtaaggtttttttttttgtatttatagtacttagccaaattctgggctcataataagcactcagtaaaggcatgttgacttttatggctgtaaatgatactggctttgagtcaatataaattagttagggggttcacagaattgaattgcagcattctctggttgggaggttggctttcagctaaaaacgttaagttggaaactatcctcacaactagaagcagttaaccagaagctgttcctgcctctatcctcctccagtctagcagtgtactgtccttgaaaaactgctgccagctcagcttttttgcttcttttcagaactgactatatccagatccttggtgtgcgttttcttttcctgtccctaggagtctccaagttgcagggactatcattatggtgacccttataggctggtgtatttatatggccatcctcattttgccagatagccgtcatactcagattggtgtcttcccataatacgtatgaatcattttccctcagttctttcttttgtcctgtctgctccattaaaaattgtctatcccatgaaatttttaaaagagactttgtgcttttagagtcgcaaggtcgttgcagatctgatgtgtttaactatagaggtcagctgggtgtggtggctcacgcctgtaatcccagcactttgggaggctgaggtgggtggatcacgaggtcaggagttcaagaccagcctgaccaatatggtgaaaccccatctctactaaaaatacgaaagttagccaggcgtgggggtgcacgcccgtagtgtagtcccagctactcaggaggctgaggcagaagaatcgcttgaacccaggaggcgaaggttggagtgagccaatatcatgccactgcactctagcctggcgacagagcaagactccatctcaaaaacaaacaaacaaacaaaaaaatatagaagtaatgtgttaatggactctccttcctttctcaggtaccatgcatttcacrgtggccttgtggagacaacgccttaacccaaggaagtgactcaaactgtgagaacttcaggtatggtgtcatcctgtgagagaaattgggggcaagagtgatgcagaggccaagctctggtcttatacctgctgtgaggagagagcagtgttgatgctagctgcatcagttggttgaacatataggcagcttcacttggttctgaaacccaaagctgcctctgcagggattagcctgtgagccacactgtgctcttaatttgggttttctgacttttctgtttttgtagatcccttatacatatgcatactttttctatttgtgttgttttatacacgtttatctctgtatactatctagacatgtgcatgtgtaggattaagaggtgggtaatgaaaaagaagacaacatggccaggtgcagtggctcatgcctgtaattccagcactttgtggggcgaaggtgggaggatcacttgaacccaagagtttgggaccagcctggacaacatggcgagaccctgactccacacaaaataaaaaaaaatcagctggtgtggtggcgtgtacctgtaatcctagctgattgggagggtgacatgggaggatcacttgagccaggaggttgaggctgcagtaagccatgatcacgccactgcactccagcctgggtgacagagtgagaccctgtctcggaaaaaaaaaaaaaaaaagacaacatggttcagtgcagaaagaatagaggacttggaaagaaaagatctgggttccgatttgattttgccactgacaagctgtgtgactttcggcgagttatttaatcttgccagacctcagtttatacatctgtaaaataggtaagtattgattcctgtctccatccctggcattgttgtgtggatcaaataaaataatacctattaaatctttagaaaaggaaatgaattcatgacttaaaatgttatcttggccaggcacggtggctcatacctgtaatcccagcactttgtttgggaggccaaggtgggcggatcacttgaggtcaggagtttgaaaccagtctggtcaacatggtgaaactccatctctactaagaatacaaaaattagcagggtgtgatgtcatgtgcctgtattcccagttacttgggtggctgaggcaggagaatcatttgaacccaggaggtggacactgcagtaagccaagatcgtgccactatactccagcctgggcaacagagtgagagtctgtctcaaaaaaaaaaaaaagaaaagaaatgttatctagatccacaaggtgagagaagttgagagtagtattgtgaaggaaaacatgaggacaagacagatcactttaaaaggtcaggagagaaggaagactactgggtaagaaaaaaaaagtagaacataaagttaagcagtaagagaatagggagtgaatgaagttgagcaggtgaattgttagataagaaagctgaggctgggcgcggtggctcacgcctgtaattccagcactttgggaggccgaggcgggtggatcacgaggtcaggagatcgagaccatcctggctaacaaggtgaaaccccgtctctactaaaagtacaaaaaattagccgggtgtggtggcgggcgcctgtagtcccagctactcaggaggctgaggcaggagaatggtgtgaacctgggaggcagagcttgcagtgagccgagatcacaccactgcactccagcctgggcaacagagccagactccgtctcaaaaaaaaaaaaaaaaaaactgaataggaagatactggtaaaatagaactaaaatatgatccagcattgccacttttgggtatatatccaaaggaaataaaatcacttcttcttcttttttttttttttttttwtgagatggagccttccccaggctagagtgcaatggcacgatcttggctcactgcagcttctgccccctgggttcaagtgattctcttgtctcagcctcctgagtagctgggactcgggaggccaggcgtgcacccaccacacctggctaattttgtattttcagtagagacggggtttcaccacattggccaggctgctcttgaactcctgacctcaggtgatctgcccgcctctgcctcccaaagtgctgggattataggcgtgagccactgagcccggtcctgttcttttttataatcaagagaaaggaaggagatggtggaatgatttgtgatagctactataaagcaatttaaaaaatatttaaaagtattattaaagtatttaaaatatctttaaaatatttctcagcatatccatttcatctcaagctcacaaagcagttctttgtggaaaggtatttgagccaacattcaggaaacctgcgttctaccattggtattactggtcacttaaattctgtgatcttgggcagctcacttaaatctccctgggcctggtttcctcacttatctattgaatgttttgaatatgatttctcaggttctttccagctcactctattatattctgtgctttatgtgctaactcactgatttttcatggctttgttgacatcacaatatatgactgatatcagaaatatcttataataaggcttcggccggccgcggtggctcatccctgtaatcctagcactttgggaggctgaggcgggcggatcacgaggtcagaagatcgagaccatcctgactaacatggtgaaaccccgtctctactaaaaatacaaaaattagctgggcgtggtggcgggcgcctgtagtcccagctactcgggaggctgaggcaggagaatggtgtgaacctgggaggcggagcttgcagtgagccgagttcacgccactgcactccagcctgggcgacagagtgacagagggatactttgtctcaaaaaaaaaaaaaaaaggcttcataatgtctgatgctttataaatgagaaaccatgttattttaagttctacttttttttttttttgagagggaatctaactctgtcacccaggctggagtgcagtggcgcaatctcagctcactgcaacctccgcctctcgggttcaagcaattctcctgcctcagcctcctgagtagctgggattacaggcacccgccaccatgcctggctaattttttgtatttttagtagagatggggtttcaccgtgctagccaggatggtctcgatctcctgacctcgtgatctgcctgcctcagcctctcaatgtgctgggattacaggcatgagccaccgtacccggccttttaagttctactttaaacattggcactgagagacctgtaggaaacgtaagtatagaaagtttaagtttgtaatatttgacaaggatctgttgagctgctattgtgctaggttccaaggggtactcaaatataaaactcctggtttaaggattttgtcaggaaaacagacttccttgccagtgattgattattataaaaaggaagttggtaaatgttacaagagtttcattgcattgcaatttaagaaattaagttcagattttttggttcctttaacatgattgaatgtattccttttttttttttttttgagacggagtttttctcttgttgccgaggctggagtgcaatggtgcaatctcagcttactgcagcctccacccactgggttcaagcgattctcctgcctgagtctcccaagtagctgggattataggcatgtgccaccacgcccagctaattttgtatttttactagagatagggtttcactgtgttggtgaggctgatcttgaactcctgacctcaaataatccacctgcctcgacctcccaaagttctggattacaggcataagccactgcacctggccaaatgtattttttttttttttttgaggcagagtcttgttctcgcccaggctggagtgcagtggtgtaatcttggctcactgcaacctccgtttcctgggttcaagccattctcctgcctcagcctcctgggtagctgggattacaggtccctgccaccatggccagctaatttttatatttttactagagatggggtttcaccatattggccaggctggtctcaaactcctgacttcaggtgatccgcctgccttggcctcccaaagtgctggaattataggcattcggcctaacataattgaatgtattttaagtgctgctgtatgctagacattgcagggacttatggtgaaaaagcaatctctgccctccagcaactcgcattttttttttccatgtctggaaattgcttaccctaatagatctatccttctgtcccagaaaagagaagaattttaatactatgtcgtcacttacaggttaagaattcatctacatattgagcttaactcactccagaaatatctactaacttgcttgctttctgagaaaatgtttattattttactggattctgcaaccttttctttgtcagttacaagagaacattttttttttttatttttttttaagatgcagtcttgctttgtcgccaggctggagtgcagtggcacagtcttggctgactgtaatctccgtctcccaggttaaagcgattcccctgcctcagcctcccatgtagctgggactacaggtgcccaccaccacgcctggctaattttttgtattttagtagagacgaggtttcaccatgttggccaggatggactttttattttttatttttttaagacaagataagctccagaaataaccatctgcatttaggtgaactttgatttgcttgttaggccttcattcgtgcaaagaaagagtaggttctacaattttgtcttgattatttttccaaataatcaaatttagttggtcacaaaggaaaggattttagtctaaaggattatattgtaggagttaacagtatttactggagttaggttgattttgaattttgactctactgtgtagtggtggtatgatcttggccaacttgcctaacttctttttgccttagttttctcatctgtaaattgggaatagtaatagcatatatacataggtattatgtgtttctgcttgaacaagacttggctcacagtgtgaagtgttagtcgttgttttcattatcatcattaccatcaaccttatctttcttaaagttatgatctgagttcataaatcattcagtaaacctatttaggctgagcattgtaaatttaaatgcctgcaagggctggatgaacatttagtaagtaatgacagatcagactgggactttaagtgaactagggaattcattcccctccaagggagcagctgttaaagcagctttggcttacaattttttttttttttttttgagacagagtttcacttttgttgcccaggctggagtgcagtggcatgatcttggctcactgcaacctcaacctctgcctcccgggttcaagcaattctcctgcctcagcctcccaagtagctggaattacaggtgctctccaccacgcctggctaattttttgtatttttagtagagatagggtttcatcattttggccaggctggtgttgaactcctgacctcaggtgatccacccgcctcggcctcccaaagtgctgggattacaggtgtcagccaccacgcctggcgtgatttttttttttttttgagacagaatctcgctcttgttgccccagctggagtgcaatggcgcaatcttggcttaccayaacctccgctttccgggttcaagcaattctcctgcctcagcctcccaagtagctgggtttacaggtgtgtgccaccacgcctggctaattttgtatttttagcagagacgaggtttctccatgttggtcaggctggtctggaacttccgacctcaggtgatccgcctgcctcggcctcccaaaatgctgagattacaggcgtgagccaccgcacctggccttttttttttttttttttaatggaggtaaaagtaagtatgtgaggttatgtatatgttatttagctcgatttagccattccacaacatgtacatattttaaaacatgttatgggctggtcatggtggctcatgccataatcccagcactttgagaggctaaggcaggaggatctcttgaggccaggagtttgagaccagcctggataacatagtgagaccccatctttattttatttcaataaataaataaaacctgttttacatgataaatatataccttttttgtcaattaaaataatttaaaaatactacttaaggtcttgggaatacactcacaatgtattggtagttaaaatttttttttttttttttttttttttttttttttttaccagttgctgtggctcacttctataatcccagcactttgggaggccaaggtgataggattgcttgagcctcggagtttgagaccagcttgagcaacatagygagatcccgtcattatatttttcaaaattaaaaaggaaagttttcagaaggttaaaaaaaaaattgaggcaaaattcactactttaaagtgtacaattcagtgttggcttactattgaccttggggagagtgcagaccatgtgcagactgaacatcttaatttttttctaaggagaagctagaaatcaagattttgtaagaaatttttattgttaaatgttggcaacttatgaattcatagtgtaaacactgtgggccaaacaaattaccactgtgggcagaatttgtcttgtggcttgctgctttacaacctctgatctggggcttgactttctgcagcataacccatgttttctgccctctgagaagaaagttcttacccacgtaaagatttaaccagcctcggcagcatggtgaaacactgtctctacaaaaaagcctcataaaaatcagccaggcatgatggtggtgtgcgcctattgtcccagctgaagtgcaagggtcgcttaagcccaggaggttgagactgcagtgagctcatgtcgctgcactgatatcatgtcactgatatgtcactgcactctagtctgggcaacagagtgtgaccstgtctcaaaaataaatamataaataaataaataaataaaacagttcaaacaatacctcaaagcagtctagtactgaatgagaggtatgtagaataattattaaggcagatagaaggagggaagttagttagttattcagaatatgccaaggtgcagaggcaggaatggacttcagggggtggagtttaattttagaggatttgtgtgagcctggtaataggcaaaagttttgaaaatttgagaagagtcaagcctcttattttgaataaccttgagacctattggctgataggattaaatggtattttgtgaagatttatttggcaaaattgaggtctgtagtatttactatggttggaggcagggagactaggctatggaggtgtcagtgggaatgaaaataaagggggaaaagcttgtataagagacaaaaggttgcattaaagagggccaattttgaaagctttttctctattgacttttgtacaaactgggatatgggaagatactgtgtacaggctatattcctcttttcatgttgtgaatcttgctttatcccttactcagtcccaacagtgtccttgttgatggattacatacgttttcttacgatttcccagcttgcacaagtagaatagaaagaaaaaccaggccaggcatggtggctcacacctgtaatcccagcactttgcgaggctgaggtgggcggatcacttgaggctggagtttgagaccagcctggccaacagggcgaaacctcgtgtctactaaaaatataaaaaattagccgggtgtggtgttacactcctgtagtcctagctacttgggaggctgaggcatgagtattgctggaaacagggaggcggaggttgcaatgagccgagattgaactgctgcactccagcctgggcgacagagcgagaccctgtctcaaaaagaaaaaaccaccaaagtagtgtaattgctcatcacatttcttgtttggggtttttggttatctcggttaacctctggtatatttcattagaccttagtttatacattgaattttcatatttaccaaggtttggaaacaatgacaaatggcttgctcttagaaagatgtagaattttcttgcagaaacttgagataactgatatggctgggcgcggtggcttacacctgtaatcccagcactttgagagtccaaggtgggcagatcgcttgagcccaggtattcaagaccagcctgggcaacatggagaaaccctgtctctacgaaaaacacaaaaaattagttgggcatggtggcgtgtgcacctgtagtcccagctacccaggaggctgaggtgggaggattacctggtcccgggaggtcaagactgcagtgatttacctgtgattgtatcacagtactccagcctaggcaacagagtgagaccctgtctcaaaaaaaaaaaaaaattatgattcagaatgtctgaagaaaccaataaatgtagaaaggtagaatatgttcagcataacctgagaaagtgatttttaggatgttattttctaaataagatttagattttgttctgtttatacttctcatgaaacttttttttttttttaacatacctgggaagttattcctcattcttggccaaatacaaaatgtcattattttagagactatagtctttttcgcaagtaagctgaatagtgtgttaggtatagtctgagtattaagaatatctgagatctgtattaaaaacagatgtaggccgggcacagtggctcacgcctgtaatcccagcactttgggaggccaaggcgggaggatcacctgaggtcaggagttcgagagcagcctggccaacatggtgaaaccccatttgtactaaaaataccaaaaaattagccgggtggggtggtggcgcacctataatcccagatactcggtgggctgaggctggagaattcctgaacccaggaggcagaggttgcagtgagcagagattgcgccattgtactccagcctgggcgatgagcgaaactctgtctcaaaaaaaaaaaaaaaaaaaaaaagatgtaaaaaaaaaaaaagaatatctgagatatagcaaagtttttctcatggatgaataaaaatactgaactgkgcctttaaaaaagtacagaaaattgcctgtcatagaaatgcagcagtagggtcaaatgagctaaatctaaatctcatttaatgaaaaaggcactttccttttatttttgaaggatggtctaacctagtttttggaattcatttgttctgcaattaaaagagatttttaggtggttcatttaattatagctgttttggaaatgggaaggaaaataatgtgagagagagattaactgcatttgcttctgtggaaagtcagtagtcaaaaggagagtctggattatttatttatttatctaaaaatatggaacacttggtgaattttaaccttatctttgctcagaggatgtactaatctctgtgttctaattttttagtatatgtgctgctgaagcaaacacacagattatttttttctgttcttaagttttttggaggaaagctatttactataggtcttaattaaaaactatattctgtatatattgaaatgtgcagaaccctgctgctgctgtttttcgttacccagaatgttgcttacatctctctactatcatcttctctccctttgttttagcccttggggtttatgtttttttattcctttatttcatttttttctgaggttttggaagggaatggagaatggggtgtgttcattctgcctggctggttgattttatatagaaattgatgttttcatctctaagggacaaagaaaattaggaaaatatcctagttttatttttattgtggtaaaatacacattacatacagtttaccattttaaatattgttaagtcttcagttcagtgacattaagtacatttaccttgttatgtgaccattaccactatcggtctctagaactttttcatcatccagaactgaaacttgtacctattaaacaataattatccatttcacctcctccctgctctggtaactactattctgttttctgtctctgtgaatttagctattctaggcacctcatcgtaaaagtggagtcatacaatatttgtcctttttttttttttttttttagacggagtctcgctctgtcacccaggctggagtgcagtagtgcgatcttgactcactgcaacctccgcctcctgggttcaccccattctcctgcctcagcctcccaagtagctgggagtacaggcacccgccaccactcccggctaatttctttttgtgtttttagtagagacagggtttcactgtgttagccaggatggtctcaatctcctgacctcgtgatctgcctgccttggcctcccaaagtgctgggattacaggcgtgaaccactgcacccggccccccccccctttttttttgagacagagtctcgctctgtcaccaagctggaatgcagtggtgcgatgttggctcactgcaacctccgcctcccaggttcaagcaattctcctgcctcagtctcccgagtagctggaactacaggtgtgtgccaccacgcccagctaatttttgtattttttaatagagacagggtttcaccatgttgaccaggatcgtctcaatctcttgaccttcctcagctgggattacagccgtgagccactgcgcctggccaatatttgtccttttgtgtctggtgtatttcacttagcataatgtcttcaggtttcatgttgtaccatatgtcagaattttattcctttttaaatgctgagtaatattccattttatatattttagtaattttttgaaggactgaataggctcaagtacagcaatgacatattttttgttcatttccctgttatcttttttgctgtgaactgtgattttaaatcatgaaattaacattgaactatgctagagatactagttttgggccacatcttctgttctgaccttaggtaatccactttgcttgggttgtttgtcttactcagttgtaagaktttattgtaaattctggatacaactcctttatcagatatgtgttttgcagattttatctcctagcctattgcttgtctttccattttyttaatgatgtcttttttttttttttttttttttgcaaaaatagagatggggtcttgcattgttgcccaggctggtcaaactcctgggctcaggtgattttcctgcctttgcctcctaaggtgctatgattacaggcatgagccaccggccctgcccaagaagttgagtgcaatcaaaattagaaactttgacccttttttaatttatttttgagacagagtctcactctgtcacccaggctggagtgcagtggcacaatcgtggctcactgtaatctccacctcccgggttcaggagattctcctgcctcagcctcctgagtagctgggattacacgtatgtgtcastgcacctgggtaatttttgtatttttagtggagatggagtttcaccatgttggccaggctggtcttgaactcctggtctcaagtaatctacctgcctcagcctttcgaagtgctgggattaccggtgtgagccactgcgcctgtttgaaatttcaactctttagaagacatcattaagtccaggcatggtggcttgcgcctgtaatcccagcagtttgggaagctgaggcgagaggatcgcttgagcccaggagttggagaccagcctggccaacaaagtctacaaaacgaaacaaaacaaaaaaacaactatctggacgtggtggtgtgtgcctgttttttttgtttgtttgttttttgagatggagtcttgttctgttgcccaggctggagtgtggtggcgcaatctcagctcactgcagcctccacctcccaggatcaagtgattctcctgctgggactacaggtgtgtgccaccatgcctggctaatttttttttttttgagatggagtcttgctttgtcgcccaggctggagtgcaatggcgcgatctctgctcaccgcaacctccgcctcctgggttcaagtgattctcctgcctcagactcccgggtagctgggactacaggcgcacgccaccatgcttggctaattttttgtttttttagtagagacggggtttcaccatgttggccagactggtctcaaactccttgcctcgtgatccgccctccttggcctcccaaagtgctgagattacagacgtgagcgaccgcgcctggcgtgtgtgcctgtatgtagtcccagctatttgggggagaatgaggcagtaggatcccttgagcccaggagttccaggctatagtgagccatgatcacaccactgtaccctagcyctgtcaacagagcaagtccctgtctctaaaaaaaaaaaaaaaaatggaaagaaatactcaaaacactcaatttctcaattgttttctttaatgaataacgtgtttggtgtcatatctacaaaaatctttgccttactggacaatcagtaaatctttcttagatttccatttgtttacctgtgagaacaaataagatgtatgtggtattttgccttctttggaatagtatttctattctgtttctttttgaatttaatcggaggggctaatcttgggatagaatgctaaggtgaaaatctacagactcaaattggaatgtagaattgactttgctttcataatcctagttgtttcctaataggtaagtggtaatttggttcctctccccttcctagtattgagggctcttggatgtaaactcttatttgtgtcattttattctaggtttttgacacaatctgaataacaatgctttttggctccttttaaggaaaatgcatgaattttgttaataaagtgcatatacatattactcagtgactcagtattgactttcagtttacttgataattcttttttcttttcttgagatggagtctcgccttgtcacccaggctggagtgcagtggcgtgatctcagcatactgcaacctctgcctcctgggttcaagtgattctctgtctcagcctctcaagtggctggaattacaggcgcctgccaccatgcccagctaatttttttgtatttttagtagagatggggtttcaccatgttggccaggctggtcttgaactcctgaccacaagtgatccacctgccttggcctcccaaagtgctgggattataggtgtgagccaccacgctcagccaataattctttttattattactattattattattattattattattattattttgagacagagtcttgccttgtagctcaggctggagtgcactggcatgatctctgttcactgaaacctctgcctcctggcttcaagcaattctcctgccttagcctcctgagtagctgggattacaggcacgcaccgccacgcctggctaatttttgtatttttagtagaaacggagtttcaccatgttggtcaggctggtctcaaactcctgaccttgtgatccgcctgcctcggcctcccaaaatgctgatattacagccatgagccaccgcgcccagtccttttttaaattttttttcagacagggtcctactttgttgctcagccgggaatgcagtggcatgatcatggctcactatagtcttgacctctcgggctctggcgatgctcctgtgtcagtctcctgagtagctgggaccacaggtgcataccaccatgcctgggtagtttatttttattttttgtagagatagtgtcttgctatgttgcccaggctggtgttgaactcctggtctcaagcgaccctcctaccttgacctcccaaggtattgggggtgggattacaggcgtgagccaccatgccagtcttgggcttgatagattttttttttttttttttttgagacagagttttgctcttgttgctcaggctggagtgcaatggtgcaatcttggctcactgcaacctccgcctccttggttcaagcaattctcctgcctcagcctctcgagtagctgggattacaggtatgcgccaccacgcccagctaattttgtattatcagtagagacagggtttctccatgttagtcaggctggtctcgaactcctgacctcaggtgatctgcctgcctcggctwcccaaagtgctgggattacaggcatgagccactgtcactgtgcctggctgatatatatatgtgtgtatttattattattttttttaatagaaatggggtttcactgggttggccaggttggtctcggaactcctaggctcaagagatcctctcaccttagcctcccaaagtaccaggattacaggcatgagccaccaggactggtctgtaattcttttttttttttttttttttttttgaggtggagttttcactcttgttgtctaggctggagtgcagtggcacaatcttggctcgtcgcaacctctgcctcctgggttcaagctattcttctgtctcagcctcccgagtatctgagattacaggcatgcaccactgcacccggctaattttgtatttatagtagagacgggatttattcatgttggtcaggctgctcttgaactcctgacctcaggtgatccacctgcctcagcctcccaaagtgtttttggattacaggcrtgagccactgtgtccggcctcttttttttttttttttttttaagtcaagtgaagcagtgggagtggagaaggaacaaagaaatctgtaactggttgtgatcagttagttgtaaataccagtgcavttggaccagccgaggcctgtaattctttttttttttttttttttttgagatagagtcttgctctgtcgcccaggctggagtgcagtggcgtgatcttgtctcactgcaacctccgccttccggcttcaagcaattctcttcctcagcctcctgagtaactgggattacaggcatgcgccaccatgtccagctcatttttgtatttttagtagagacggggtttgaccatcttgggcaggctggtcttgaactcctgaccttgtgatccacccgcctcagcttcccaaagtgctcagattataggcttgagccgccgtgcccagctgcctgtaattctcaaataatgtttagaaatgatctgaggaaagtttgctggaaggatgaggcatggtggatattagggtctttttttttttttttttttgagacggagtctcgctctgtcgcccaggctggagtgcagtggcatgtcctcagctcactgcaagctctgcctcccgggttcttgccattctcctgcctcagcctcccaagtacctgggactacaggcgcccgccaccacacctggctaattttttttgtatttttagtagaggcggggtttcaccgtgttagccaggttggtcttgatctcctgacctcgtgatccacctgcctcggcctcctaaaatgttgggattacaggcgtgagccaccgcacctggctattagggtcttatattttgagaatgtatagatatttagagatggtcagaaacaagaaaattttttttttttaagaccgagtctcactctgtcgctcaggttggagtgcagtggtgtgatctcagctcactgtaacctctgcctctgagattcaagccattctcctgcctcagcctaccgaggagctgggaccacagtaggcacatgccaccacgtccagctaattttatgtgtgtgtgtgtgtgtgtgtgtgtgtgtggttttttttttttttttttttagcagagatagggtgtcactatgttggccaggctggtctcgaactcctgaccttaggtgatccgctcaccttggccttgcaaagtgctgggattacaggcatgaagcatcacctctggccagaaacaaggattccttagagccaggaaattcaacattatatataattagatgtataatttcacacaagcattgtttgcaagagaacaatacttatagtagtacaacaatatttatatttattgtggcaaatgctttaaactctagcagtagtcaaagctagaaacaacttgtaataatagttaattttgaaatgtttgtcagaaagctgtttgtcagaaaggggaagagatcaccttctggaatattaggtacagagttcaaaccagcaaatgaatgctaaaagttagatcctggtgccaatttccttaaattctgtgttcatactgttgaacctcgaaagttgtagcttcctctttttctctttgaacagtataattgtccttttttgcatatgctttagaatccatactgatgtatttggttggaaagtgggaaaggagcttttagtgttctgagatcattgtgtgatgttcagaaccaaagtgtcactgttacatggtagagaatggttcatattctacctccttgttaagtcaattaagtcaatttttcctagtaaatgggaaagcaaccgccttccctatcatgaggggttttgggtttcttcccacttgctttgctgagaaattaaattatggaaatgggtatttaccctctgctccaatctaaataaacttttattccttctaccaataccttcagtagcccatgcaccaaagtcggctcctttgtttttttttttgttttgttttgtttttttgaggcagagtcttgatctctcgtccaggctgtagtgcagtggtgtgatctcagctcatggcagtctctgcctcctgggatcaagcaattctcagcttccaagtagctgggatcacaggtgcctgccaccacacctggctaaggtcctttgtgattattagcagagaatgggatctaaaaatgttcctgtgttccttctagctagtctttgctactgtgcccctagataatgggatctagtttttcacttgagtagtgtttttgggaacatgacagagtagccctgtccaagggagacatactactcggtatgtatttctaatttaccacacatgcttctgtattttatagtaagattgtttgagagtttgacttcattagggtttagttctctgaataccactatatactttagctctttgaactctggactttctgtcacaagcagtttttctccttagtttttttgtgtcttctgaaatgtcattttggtggattcttttaagaaaatatagggctatattaaattacttaaaggttttctaagtcacaatagatgtggcctgtaaaaatatctgattatgttgggtgtgttatttctgaaaataaaccaagcaaatttcacaatatcctgtttaataatttctctataaataagatacatatttaaaataaggctataaatgtttgttgcttaagagacaagatattactgaaattatcttctgaagtatgtctatccctttccacatttttgtttccactgccttttcagtaagatgttaaggttaattttacctctggcagtgttttagcaccttctttctatattgggcattctatctgtcacatttttctagtgtagtagtaaacattactcaaaataaatgatttataggccgggtgtgatggctcatgcctgtaatctcagcactttgggaggccgaggcgggcagatcacctgaggtcaggcattcgagaccagcctggccaacatggcaaaaccccatctctactaaagatacaaaaaaaattagccagatgtcatgcatgcctgtaatcccagctactagggaggctgaggcaggagaattgcttgaacccaggaagcagaggttgcagcgaggggagattgcgcccctgcactccagcctgggcgacacagtgaatgtctgtctcaaaaaaaaaaaaaaaaatttataaagtgctaagtattgacccagctgggcacagtggcttatccttgtaatcccagcactttgggaggccaaggcaggaggacgacttacttgagcccaggagttcgagactagcccgggcaatatagtgagaccctgtctctatctccctgtaaaaaattagatgggcctgtggtatgtggctgttagtctcagttactcaggaggctgaagcaggaggattgtttcagcccaggtggttgaggctgcagtgagctcgatcactctagcataggcaacagagcgagaccctgtctcaaaaaaaaaaaaaaagaccctgttttgagtttctttgtaactgacagactaataggtaatagagttttaaaatattgttactagatttttttttttcttttttgagatggagtctcgctctgtcacccagactggagtgtagtggtatgatcttagctcactgtaacctccgcctcctgggttcaagcggttctcttgcctcagcctcccaagtagctgggattacaggtacctgccatcatgcctggctgatttttgaatttttagtggagatagggtttcaccatgttggacaggatggtcttaatctcttgaccttgtgatccacccgcctcggcctcccaaagtgctgggattacaggcgtgagccacagcacccagccatgatttagattcaaactgtatcttcattggttccagtcacaatggtttacagtgctaagtaaagctatagattgcatactgctgtacttgtgaaggctttttttttttttttgagacacggtctcactgtgttgcccaggctggaatgcagaggtgcagtcacggttcactgctgcctcaacttcctgagttcaagcggtcctcccagtttggcctcccatgtagctgggactataggcatgcaccactgcatctggctaatttttaaattttttgtagagatgggagtctcactgtattgcccaggctggtcttctgaaggcttttagtttgtttgtttgcttgtttgtttttaaatcttgtttgcttgcttttcttttctttcttttctttttttttgagatgaggtcttgctctgtcgcccaagatggattgcagtggccttatcacagctcactgcagcctctacctgctggtctctggcgatctttgtgcctcagcctccccgttaactgggacaacaggcacataccaccacatccagctaatttatttttattttctgtagagacaggattttgctctcacatatctgtccaaccaataaacaaaaaagttatgatactcagggcaaagttttctctaactcctcaaaaggacttgaatttaggacatctttcttactgagacatacaaaggcttaaaagtatgtattacaatccaaaacactcaccactgtctaacatttctcctccaaatgagagcactaatagcctattcaaaagagtctctaattatgaatgtgaagttacaaagaatgtttttttgttcttaggtctatgaagataacacaaaggcaacaagtgaaaacacaatgcataaagtttcactttagtccccttataacagaaaacaagagatgaagataagagcacttttgctgtcctagaacttaaaatgaaaatctaagagagacccataatataaatacaatcatcccttggtatatgtggggattgcttctaggaccaccacatataaccacgtcagtgcatgctctgaagtacgccctgtggaacctgcgtatgtgaaaagtccttcccatagacttgggtttcacatcccatgagtactgtattttcaattggtgttttttatttttattttttattattttttaaaaaattttaattaaatagaaatgaagtctcactatgttgcccacactgctttcaaccttctgggctcaagcaaccctccctgctcagccttccaaagtactgggattacggacgtgagccactgctcctggcctcaatctgtgtgtggttgaaaaaaggctgcatataagtggatctgtgcagttcaaaccagttgttggacaagagccaactgtaattagaattataaaaattgatgccatgctctctgtgtgagtaacaatgcagtaagaatatgcagattttagtcactaattttgacttcctgggaaaggaactgcagactagatgctacaaaagagaaacacttgagggtgaaaaagattaactgtaagaaaatgggaaagagactaagaaatccagtttcttagaaaaacatattcagtagaaacttaggaacagaagtgatgtcttggttggccatgagatagtagatccctacaaccactagaaagtgtccattagggacattatccctttagggtaatgtgcaggtggtcatgtttcagactttattactcaaagtcatgaccactggggaggttagataagcatctttttaaggggttatctatgttacaggcattgtttaaagactctgctgaagaacaccttggtatgcaggaatcaaacattggtcagggccaggcactttgggaggccaaggtgggtggatcatttgaggtcaggagtttgagaccagcctggccagcatgatgaaaccccatctctactaaaaatacaaaaattagctaggtgtggttgtgggtgcctgtagtcccagctactggggaggctaaggcaggagagtcgcttgaacctgggaagtggaggttgcagtgagctaagactgtgccactgcactcagccagggcaacagagtgagactctgtctcaaaaaaaaaaagaaaaaaattggttagcatgatggtttcacttcaagatggcatcactcttgcatgcaacaggcagttttcctacaactgtctttaattctgcagatactctgtcagtctttaaaatgaaactataaattatagattatctacatttatggatgaagaaagtgtggcttagagaaattcagtaatttgctcaagttcacagagtaacagttcaggaatgttgatctagatctgtctgacttcacagttggcatacataattaccatgctataatgtcttctgtaatacatggtatagaattgacaagaataatctttttttttttttttttttttttttgagatgaagtctagctctattgcccaggctggagtgcaatggcacgatgttggttcactgcaatctcagccttccaggttcaacgatcctcccgcctcagcctcccaagtagctgggattacaagcgtgtaccaccatacctggctaatgtttgtatttttagtagagacgaggtttcactatgttggccaggctggtctcgaactcctgacctcaggtgatccacctaccttagcctcccaaagtgctgggattacaggcttgagccactgtgcccagcctagatttaatcttttttttttcttttttgagatggagttttgctcctgttgcccaggctggagtgcaatggcgcaatcttggcttactgcctcccgggttcaagcgattctcctgcctcagacttccgagtagctggaattacaagcatccaccaccacgcccagctaattttttgtatttttaatacagacggggtttcaacgtgttggccaggctggtgttgaactcctgacctcaggtgattcacccgtcttggcctcccagagtgctgggattacaggagtgagtcaccacgcccggcctagatttaatcattttaaccatgtatgcagttgtaaataatagaactaagaatctggcgctcaggggagaggatgggacttgaagtgtggattatctatttttttctactctgttttatgctgtttttaaaattgtacaagtcaacagtgatacatgtcctatttttagaacttcaaacaatacatacaaaactacagttccctatgaccacgtacttgagtacacaggtgccctcctcctgaatggaatgtatactttttctgcgtttatttacaagtatttgtacccataggaatatatagtgttttagtttgcaaaaataatatcatactgtacatactgatggggtgatcattttgtgatctaccccaccccaactcatgcatgttgttctgcagctttaaagatgttcttgggatctctcaatttcagtcattaataagttacttattttgatacctgcatagtaatctgttctgtggtatgaatatgtgatttaatatatgaatatgccaattgataatatacattatttctaatttttttgatattatacaaatagtgatttttattcttttcaagaatttaaaatgcttggtgaattttagttatgtaaaactagtatgtatatgtacataaattattgaaattactaggatgtttttggcagagcacctcacaattctaccataatgattctctgtaattatctggagagtcattgttcttaaaaatgtttgcagtctgtgctttcattaatcttttctacatgaagttaattttagtttttaaaatatacttaatttttgtagagatttaaaatttkttgcaactttgtaattaatgttaatttatatttagaataatttatactgtactattagggcattttcttgcaataaattattagtggagatgagcgactgttgatggagatgagtacctttatcatgcagaatatcagcagccagatattggacttttctcactgccccttaatttactttttwaaatattgtcgttctatggcaatcaggcttttggatattgaggaggaagtaataactacataatgtgataatgatgtctttgaggacccttgtccataacaagccatttgaatcagaataatatcttgtgcaatatggtgttaaggcttttaggttacatctcatttctgaatgtattctggatgacttctattgactttatgatgtttacctttcatatttaaaataagagggttcttttagcagattttggttataaaacatctgaaatagtgtaatttaaataaacaaggtaaaggaaaaaaatatatgtattatgccaagaaaatgagctagtccttatggttgagacgaaattttagctttgagcatttttgtatgtaagcacagaatgaagtaggttggattttatagggttcatctcagtaggaattattgttctatttcatttttgcagaattgagaagccatcataattgttttatatttaaacttttaaacagaaacctaaatttgcataaaaactcaagacagcgtttacagtttcaaggcattttgtttgccttattgtatttgtgtacttcttccatagtgcctggcaaacagtaagtgccaagtacatttagtttgattttattttttattgtatcttatttcttcttttttgaggtagggtcttcctctgttgcccaggctggagtacagtggtgtgatcatagctcactgcagacttgacctcctggttggggagtggtggtgtgcaccagtggtcccagctactcaggaggctgaagcagaaggacccccccagcccgggaggcgctccagaacaccccagcttgggtgacagagtgagaatctttctcaaaaaataaataagtaaataaagttgcttgggacatgttatatagatgctatttaaagctatctggataggtaatatcctccagtttataatcatctgtaccccattgcgtgatggggtgatcattttgtgatccaccccaccccaactcatgcatgctaacagttatgtatgccttttctccaatttatctgcctgcgttttgtcagacgattttcagcgaaccttcactgggcaaaggggaagtcttcttttggcccctgtattactaacaagcattgacttctaaatgggtaatttggtcaggtgtggtggctcacgctgtaatccagcactttgggaagtcagggtgggaggatcacttgagcccaggagtttgaaaccagcctgggcaatatagtgagatcctgtctctaccaaaaattaaaaaaattaggcgagcatggtggcacccacttatagtcttacctactggggactgggtaatatcctcaagggaatgagtgtagatagaatagggaaccaagaactaagatctaggatatgttagcgttaagataatggagaaaaggaatcatcagaggatactgagaaggaacaatctgtgtggtaggacacaaacctggagaatatatcttgggaactgaagggaagaaagtaaaacatggaggaggggatgaacagccatgtcagattttgccaataagttaggtaggataaagactagaattgaaaattgtgtttagtaatgtaaaggcctttgttacatggtcttcagtaataaatagccaggttagcactatttatatatgtttttaatgggaatttttgatgtttacagtgtctcctttgccatgttcaggttttccaacctattggtggtatgtctgacagtggatcacaacttggttcaatgggtagcctcaccatgaaatcacagcttcagatcactggtaagttttagaaacatcggctgctttactttatttttccccgtatgattaaaaaataatcctgagagggccaggcatggtggcccatgcctgtaatcccagcactttgggaggctgaggtgggcgggtcacttgaggccaggagtttgagaccagccaagccaacatggagaatacaaaattagttgggcatggtggtgcacacctgctgtcccagctactccggaggctgaggcgtgagaatcacttgactttgggaggtagaggttgcagtgagctgagtttgcgccactgcaccccagcctgggtgatagggtgagactgtctcaaaaaaaaaaaaaaaaaaaaaaacttaagagaacaaaatatttaatggctgttacatgtcaggtgctcaattaatatttgctgaatgaatgaatgaagatatatagatatgtaatttttattgtagaatattcttggatattttacagtttttttttccttcaacatgggtacctgggtagttgctaattatgtttgtttggtattgtattaacagctttattgagatataattcatatcccctacaggttacccatttatttatttacttataacaatgacacaatcatgcagcctcctgctgtggtgactacagtcgtgcaccaccatgcccagcaaattctgcagttttttgtagagatggggtctcactataatgcccaggctggtttcgaacacctgggcttaaatgatcctcccactagggcctgacaaaaggcagataaataggagaaaaggcgtacatcttattagcatgcatgggtaggggtgggatggatcacagaatgattaccccatcatgcaatggggtacaaaatggttatatactcttcttcataggggaaagggagatggggaagtgtggatgattttagagggatggtaaatgatttttaggggaattcagagggctcgaagaatgtacaatggcctgggacaaagtctgtttggcccacagaatagatagtggtttatgacaaaagtctctccaggtccaggtctgttaaaagacttcagtcagccaggcacggtggctcacacctgtaatcctarcactttgggaggtcgaggtgggcagatcacctgagattaggagtttgagaccagcctggccaacatggtgaaaccccgtctctattaaaaataaaaaaaattagctgtgcgtggcggtgcacacctgtaatcccagctacttgggaggctgaggcaggagaatcacttgaacctaggaggcggaggttgcagtgagccgagatcatgccattgcactccagcctgggcgacagagcgagactccatctcaaaaaaaaaaaaaaaagacttcagtttttatattcctgctatacaagtttagttattgaaaactcagggatgggaacaaaggtaattgtaattgttttcttctttggtggatctggacttaggcagataagagaacttcagaaaacaacttcatgctgtactttgagagaaagaagattgagggaggggagctgcaggggtcagagagaccttgagagacttacttagttcagcaagtcaaagcaccatattttgggatatcagtttctgaaccccaaaagtacattcacagagttcagcaaccatcaccacaatcaactttaaaataatttcgtccttccaaaaagaagccctgtactcattagcagtcactctccatttaacccatccatccacaaacccaggcaactcctgatctttctgtctctagatttgcctattctggatctcgcatataaatggaattgtacagtgtgtggccttttgtgtcttctttgggcagactgttttcaaagttcatccatgttgtagcatgtatcattacttaattcctttttttgctaaataatattttattgtawgagtatacgaaattttaaaaatccattcttcagttgagggatgtttgggttgtttccactttttggattttatgaaaaatgctataaacatttgtgtacaagtttttgtgagaatgtatgttttcagttttcttgggtatatacctaagagtgaaattcctaggttatatggaatccatgtttattagcattttgaggaattccaaattattattattattatttttttttttttttggagacagagttttgctttgttgcctaggttggagtgcagtggtgtgatctcggctcactgcaacctccgcctcccgggttcaagtgattctcatgcctcagtcttctgagtagctgggactaccggcacgcacaaccatgtgtagctaatttttgtatttttagtaaagacggggtttcaccatgttggccaggctggtctcgaactcctgacctcaggtgatccacctgcctcggcctaccaatgtgctgggattacaggcgtgagccactgcacgggcccaaattatttttaaaagcagctgcaccgttttgcattcccactagcaatatatgaggattccgatttctctacattcttgccagtgattatcttttttatgatagccattctagtgggtgtgaagtagtattttactctgtgtgtgtgcgcgcgtgcatatgttttatccatttaatttttttttttttgagaccaggtgacagtctgctctgtcacccaggctggagtgtagtggtgcagtcatggctgactgcaatctctaacttctaggctgaagtgatcgtgccacctcagccttctgagtagctgggactacaggcatgcaccaccctacccagctccctattgtggttttggcttgtactcctttgatggctaatgatattgtcttttcatgtgcttattggtcatttttgtatcttttttggagaaatgtctgttcacgtcctttgtttgctattgtaaattaatacctctgtcgctattgttaattaatatctctgtctttatttcttcctctaatcatttcatgtatcactttcagattaatgtttttaatatgccatccaatatgtttcattcctgctcaaaaaccttaggtacttctcttagactatggtatagagtttctttagtatgagctaagacccttcaccctctgtctacatatggtgtctttgtaggttttttgtttttttttgtttgtttttttgagacagagtctctgtcgcccaggctggagtgcagtggtgcaatcttggctcactgcaacctccgcctcccaggttcaagcagttctctgcctcagcctcccaagtagctggggttataggcgcccgccaccaagcctggctaatttttgcatttttaatagagacgaggtttcaccatcttgaccaggctggccttgaactcctgacctcaggatccacccacctcggcctcccaaagtacagggattacaggcgtgagccaccgcgtccggcctgtaagtctttatatgtgaaccatttgtrctagctagaatgagtcactggattttcctcagatgtgtatgtatttctatcacacaatgaaaacctcagtctctctccctttaatttgatagcatttattgattatagaacaattatcatcccctgtattttagtttcaactatgcctggcttatagcttcttctggattatgaataggttaggtcacagatcatatcttagcattattattttcctcaaaacctaaaggtgattgaatataaaaataatactgtcttaaggtaaccacatcatagaattttttcggatttccttcactaactctggtatctttccttagcagtatctgtttcttaaagaaagatattactatttcttagttaaggccagattccagttttttttccccacccctcatcctcaatctagcttgagtagctgacttatatcagaccagaattcttatgacttctttttggcagcttaaagttgaaagcttttattagaacagtcctttaaaacattctgtactttttcagattacataagtaatatacattttattttttactgatttaaaaaaatagtaaattattctcagagacaatgattaatagtttttttctttgcataaagtgtcttacttgctatcatcgttattgaattttttttttttttttactgtgatgataaacactaattgcacctcaaaaagtcgtaatccatagccatctcagatttttttctttttgagatggggtctcaccctgtcgtccaggctggtgtgcagcagcgtgatcatggctcactgcaaccttgatctcctggggtcaggtgagcctcccacctcagcctcctgagtagctggaactacaagtgtgcgccaccacacccggctaatttttgtattttttatagagatggcgttttgctctgttgcccaggctggtctcaaactcctgggctcaggtgatccacccacctcagcctcctaaattgcttgtattagaggtgtgagccacctcactcagccacatctcagatttttaaaatcttgggtctaaaatattctttttctttttttttttgagacagtttccctttcgttgcccaggctggagtgcaatggcgtgatctcggctcaccgcaacctccgcttcccagattcaagcaattctcctgcctcagcctcccagatagctgggattacaggcacccgccactatgcctggctaatttttgtatttttagtaaaaacgggttttcaccatgttggtcaggctggtcttgaactcctgacctcaggtgatccacccgcctctgcctcccaaagtgctgggattacagcgtgagccaccgcgcctggccttaaatattctcttttttataaatttttttctttttctttttttaattcattgcttgctaattgggtctaaatattctgagaatgctcaagtgtagggcaaaaaacaaacacaccatgaataatggataatagttcagcaaacattattagatatgaaacagagaacataagataaaagacagaagtgccaagtttaatagaatcaaatgcccttcataattcattgagttacttctttagttttgatgctagaatgcttagaactaagtattttgcacaaatctccttaatgacatcgtgggttttaatctcttaatgggtcagttatagtatttgttttattgtaagctgcctcaatgcctttctagaatcaagtaaggaataaatatgcaagtgtaaaaaatgaatgtcaggctgggcgtggtggctctcacctgtaatcccagcactttgggaggccgaggtgggcggatcacttgaggttgggagttcgagaccagcctgagcaacatggagaaactctgtctctagtaaaaatacaaaattagccgggcatggtggcacatgcctgtaattccagctactcggggggctgaggcaggagaattgcttgaacccgggaggcggagatggcggtgagctgagatcgtgccattacactccaatctgggcaacaacagtgaaactgtctcaaaaaaataaataaataaaataaaaataaacaaatgtcaccatgtattgtaatggcaagaagggataactggtcaggaaaaagagatcagtatttgactagagtcactgggaaagaaggtggtgtttggattgctgctatttatttatttattttaagggacagggttggccgggcatggtggctcatgcctgtaatcccagcactttgggaggctgaggcgggcagatcatccgaggtcaggagttcaggatagcctggccaacatggtgaaaccctgtttctactaaaaaatacaaaaattagccaggtgtggtcatacgtgcctgtaatcccagctactcgggaggctgaggcaggagaatcacttgaacctgggagacagaggttgcagtaagccaagatcgcacccctacactccagtggcacagtcacggttcactgcagccttaacctcctgggctgaagcaatcctctctcctcatcctctatagtggctgggactacaggcgtgtaccacccaccacacttgactaattaaaaaaaattgtgtttttgttttttttttaagacggagtctcgctctgttgccaggctggagtgtggtggcgtgatcttggctcactgcaacctctgactccctggttcaagcaatttttctgcgtcagcctcctgagtagctgggattacagacatgcgccaccaagcccagctgatttttgtatttttagtagagatggaattttatcatgttggccaagatggtcttgatctcctgaccttgtgatctgcccacctcagcctcccaaagtgctggaattataggcgtgagccactgcgcccggccaaaaatttttttttgtagaaacaaggtcttgctatgttgcccaggatggtcttgaactcctggcctcaagtgatgctcccagcctttccataagtgttggaattataggcctgagccactttccctgacctaggattgctgctgtttaaatgcagaaaagtagaaaaggaccctttgaggagacagcatgagcaagacacatgaaagaagagagtacacaaaacttgccctaatacccatgaaagctcctataataggggagccctgagaatgggaatggctgtgtctttcaggtgtgccttaaaaaaaatttattgctaagggagatggagatgggaagtaatcagtgtttgtatcaaagggtggttagatttgtgttttagaaagttagaaagagaaaaaaatttttctttttttttttttttttttgagacagtttcgttctgtcgcccaggctggagtgcagtggcgcgatctcagttgactgcaatctctgcctaccatgcccacccccttacctacttatttatttatttattgaaacagagtctcgctctgtcacccaggctggagtgcagtgacttgatcttggctcactgcaacctccgcctcccaggttcaagcaattctcatgcctcagcctccccagtagctggtattgcaggcatgcaccactgtgcctggctcactttttgtatttttagtagagatgaggctttaccatgttgtccaggctggtctcaaaatcctgacctcaagtgattcacccacctcggcctcccaaagttctcgaattacaggcgtgagccattgttcccagccaatttttaaattttttataaagacacattctcattgtgttgcccaggctggtcttggatgttttgaatcagctcttcgtttcttcttatcatttagccagggtctttaccttggatgtaagtctgttttcttatgtccttccctgtctttatttacctgtttcccatttaattatgcctatatataacctcagctattatactgaactcatctgtgtcttctttttttcttttttttgaccgggaaatttttttttaaattacaagctcaacccatttgttctgtttcaaaggtgcagtacttttcttcatttattagtgaaagaagttaagaaattaactttccaaaaaaatcagcaaatggcaagcaaatgtccttgaaagtcacagtcacatatagtgtctcctagaaaagaggaggggtaagacagcttccacctactttcacaagtttcatcaaatactggatctactcaagggtggagtaaaaaggcaactaactttctaaaaggagtatgttattaaatgaggcatttactatactccttcctaaaagccccagatggggaacatgttttctcaactagacctaggaagtagactgtggaatcaatcggtcctcctcaccttaagggccatccactggttaatgaattaaaaaaaaaaaaaagactgaaaaacaaacctcccccctaaaaaagaggagggggaaaaaaaaccactaagatgtcccagagtggaatcagggagcagcttcaacaattccaattagtctgttacagagtcatccacaagcatgccttgctttaaaaatacatatatatatcttgaaataacaaaactgaaactagtactaatcacttttctgacaatatacaattactcaaaattaactagtactgggctagggatacgggggggcggcgcatagctatgggccttgtctcacatgagtacatgtgggtaggtgcagtgcgtttgtcattatggcaaaaacgaattttaatttttaagctttagtttgacttaaacattgcttttagtatgatgccaacaccagctatgcagaaagggctctggagagatgttcctagcagcacacatatgcagctcttcttcggttctggaggttccagggcagccaatattgcttcgtcaaatacattctttaggcctttctttgtgaktgcagaacactccacgtacttgacagtcttcaggtcatgggccagcttattcagcagtctctggagtgataggcttctgtttgttcttggcaagtttctcaatagtagaggggtcatctttgagatcaatttgggtcccaacaagcaacaaaggagtctttggacagtggcacccacttttctttcacattttcaaatgaaaatggagagatggagagaccactgaaaaatagactagaaatacatctgtttgtggataactcagcagtcataatccctcataatcctcttgctctgcagtatcaaaaagtccaagagtatatggttctctaccagtcataattgttattgcatagttgtcaaaaacagttggtacatattctgatggaaatttgttgtgttgttttaccaacagcaccatcacccacaacaacacacttaattgtctgcattgctgaaatagttttgtatccactttaaatatttcaaatctcatgttgacctcagcttctccaccgggttgttggctcatctgtgttttttatttgatgtttgttgtatgctagcattgggcaaaataaggaaactttggtatttgccagaaatttcttatattctcgtctttactccaaattaagaaagagatgtcatcttgattttagttattattaatcgtaattaaatattactgcatttcccaaatttattacagtgcaatatatttagctctgattgttcagggaccaaaaagatcccttatacttatgttttttttttattcctttaacagtccagcaaactaagaattttatacttgtgatttagagtttagttctccacaggcagggcagagttcttccaaagaggtagctgttgctcaactggattgatctcttacctggttcattattctgcttatttatttagttttggcactgttttttgttgtaccttgttctctgtagcttatccaaagtaggttggataagctacggatccattctttttttgtatgtgtattgtaaaatgtttatgttgtatcagagagatacactgaagaactgaaatcagttcaaagcactgaccttcagaacagaaggatcagaggaacattagtttaagccatgaaaactatttgcattagtatgtgggtatgtgtgagagagagagagcacatgcatgggagagtgagatagccagcaagtgattataataaagcagagagacagagactagaaagcagggaaacttttgttttctaccatgactaataacaatttggttcaacatgtatattaaatacctctcagattaaatcccagagtgctccagaaattgtaaagattggctatatctgtgcaatcaagaggctcacggggtgagttaaatgagtaaaaactagtaagacaaaatgaaaagctgacggagccatacgtaaatatggaaatactctggaagcatggaggtggaaataatttaacttcttaggattaaagaagcctttaatcaaagagaagggggatgtttatctctcaggaaatataattttaatgggtataaaagaaaaaaggatcattctcagtagagggagcagcatgtttagaggaatgaaagtacatggcccatgtgaggaacagcaaataactaagggtggctagaatatagaactttggtaagatttgttttagtaggaggctggaagggtaagttatagctgcatactaagcaaggtaaaatgccccataagagtttaaacttcatttttcaggcaataaagaatcatttaagtaatgacattaatgacatgatcacatctattctaggaaaataattctggtggctgtgaggggttggattggagaagtgagagtaaaaacagttgtttagaggcctctcatagtagcccaggtgtcagatgagactgacatttttctggtcctttttcttccggtttataatgtatagttttttatttttttgtttaatttactgtgggactttagttttcagaaagtagtacattgatttattttatatttgtaatattatgactataacacaaggttttgttcaatctagactttgagatttgaatactgaaataatttctcctgtccaggttttgcagtgtgacccttgggcaaatttttaaatttcacagagcttctgtcttttttttttttttttttttkgagatggagtttcacccttgtcacccaggctggagtgcaatggcatgatctcagctcactacaacctctgcctcccgggttgcagtgattctcctgcctcagcctcctgagtagctgggattacaggcgcctgccaccatgtctggctaatttttgtatttttagtagagacagggtttcaccatgtttgtcaagctggctcctgacccccgttgatccttttgactgagacttccaaagtgctgggattacaggtgtgagccaccacgttcggccgcttctctttttatgtgtaaaaattaggacagtaatacctgtttcgcagaataggtattgatattgaaatgacatttacgtgcaggcacatggtaaatactaaaattggtgctcctccacccccatgtaaagtttgttaggccaggcctggtggctcatgcctgtaattccaccactttggtaggcctaggtaagtggatctcttgagcccaggagtacaagaccaacttgggcaacatgtcaaaagcttgtctctaccagaaaaaaaatacaaaaatttcctggatgtggtggcacgcacctgtagtcccagccacttgggaggctgagatgggaggatggcttgagcccaggaggtagaggtggttgcagtgacctgagattgtgccactattctccagcctgggtgacagaaccagaccctgtctcaaaaaaaaaaaaaaaaaaaaaaaggtttcagtggggtttggtaggattatgtagcaaaattgctttcacaaatttgaatccagctggrcacagtggctcacgcctgtaattccaacactttgaggggccgaggcaagtggatcacctgaggtcaggagtttgacaccagcctgaccaacatggtgaaaccccgtttctactaaaaatacaaacattagctgggtgtggcggcgcgtgcctataaccccagctgcttgggaggctgaggcaggagaatcgcttgaacccggcaggcggaggttgcaatgagctaagattgtgccattgcactctagcctgggcaacaagagcgaaactcctatctcaaaaaaaaaaaaaagtttgaatcctagaaagccccaacaggggcagatcatttccttcctgtcagccttgcgttgctstttgttctaggtttaatcagtttcagagtgccacaagaggccctgaaatataatgagtgtatgtataattgtttgggctatttcaccttttcttagaccagaaatgtattaaaagtagaaattttatgtttttctgtgtaatcctgtgattaaatttggctctatattaagcactagagctttgatttaatagtactttttttttattttttattttttaatagagatgaggtctcactgtgttgtccaggctggtcttaaactcctgggctcaagtgatcctcccgcctgggtctcccaaagtgctggtattacgtgcccggcctattacattttaatcagagatagctctggtccccacttgaatattttttattctgaaaaagactttctatttcatgtttccacttagatgtctcagcatctggcatctgaaacaatttttttttttttttwaaagacagttttgctctgttgcccaggctggattgcagtggtgcaatcacagctcactgcagccttgacctcccaggcttaagcgatcctcctgcctcagcctccccccagcagctgggactacaggtgcacgccatcatgcctggctaatttttaaaattatcttttgtagagacgggggtctcactatgttgaccaggctttgttcaaactcctgggcctcaagtgatcttcctgcctcagcctcccaaagtgctgggattacaagtgtgaaccaccatgcttgatcttgtctatttgtctagccttctcttgcaactcttctttttcttcagtcagtcattctgtggctagcttgaatgccagcaaaaaggcacataagcctaaaaggatggaagtatttgatatatrtaaagtcagagtttcagggccaccacctgggactatgcctgcttagatatccagactttggactatatattaagctgctgcttcttttttttttttttttcgagatggagtcttgctctgtcacccaggctggagtgcagtggcgcaatcgcggctcactgcaatctccgcctcccaggttcacaccattctcctgcctcagcctcccgagtagctgggactacaggcgctcgccaccacgcccggctaattttttgtatttttagtagagacagggtttcaccatgttagccaggatggtctcgatctcctgacctcgtgatccgcccgtctcagtctcccaaagtgctgggattacaggcgtgagccaccgcacccggctatattaagcttcttaagtagttactatataaactcctctgacaactccaagggttccttaactttgatgagcattrgcattctctgaactttgctgctacagtagataacctgggtggtggagtagataacctgggtggtgggtacttccttggttgtagttacctcatctatgagggagcaatgacttgccacctatggaaatcatggggtgctttgctagatttctacttgttataccctgtaaggggcctggacaaagctattttatggcaaaggtaactaaaaggtgaaggctaaggagtttgtatctcaagatgcacaacataggaagctcttccttagataatatgagatgttaaaaaaaaaatcttagtttgtagttcttattcttccattggctttccaacacacagaataaaatctaaattatcattattattattatttttgatacgtaggctcactctgtcgcccaggctggagtgcagtggcataatctcggctcactgcaacctccacctcccgggttcaagcaattctcctgcctcagcctcctgagtagctgggattacaggcgcctgccaccacacctggctaagttttgaaattttttagtagagacgaggtttcgccatgttggccaggctggtcttaaactcatgacctcaggtgatccacccgcctcagtctcccaaagtgctgggattacagatgtgagccgctgcgcccagctgcagattctttatcttggtttataaagctcccatacaaagcttatctcccttcatttaccattccttcctgtgcttgctatactttccctcagatatgccatactcatttgcctctctctggaatgctgtcttattcccacctccagtcttcccatggctggctccttgtcatttggatggttgcttaaaagtcttctcaaaggccttccttactaccaagtcattttctgtcacatcagcctgtttttcatcataaatactttaattagaatataatctccttgaaagccagatccttttctttactgttaattgctttagggacagagtttagagcagtatctgacacatggtaggcattcagatgtttgttgaccatgtttgtcaatgcatacattttgttttgagatatggtctcgctgtgctgcccaggcaggtcttaaacacctaggctcaagcagtcctcctgcctcagccacctgagtagctgagattacgggtgcaagccaccctgcccagccatatgtgtactttttaaatttttcctcctgttgcccaagctgttgcacaaccatagctcactgaagccttgacctcctggactcaagcgattctcctacctcagcctcccaggtagctgggactggcacacgccactgtgcccagctaatttttttgatttttaggcgagatgaggtctcgctatgttttccagattggtcttcgactactgagcttaggcaatcctcttgcctcagcctcccaaagttctgggattagaggtgtaacccgctgcacctggcccatatgtgtactttttaattgatctgagttctggacttttgataccatggaattctactgatgggaatttgggttgatggtacggggaacctctatatttatttactaggatgggaggaagtacaaaggttatgagtgaataaaattggtaagtattttagagcaaaactgcttctctgagtaaatttagtaaatctgcctaattatgaagttaaattgatttcatgagtgaattaacatctcaactattgaaatgtttttcatttcttttacatagtcatctcagcaaaacttaaggaaaataagaagaattggtttggaccaagtccttacgtagaggtcacagtagatggacagtcaaagaagacagaaaaatgcaacaacacaaacagtcccaagtggaagcaaccccttacagtgtaagcttggaagtatttttctgtagtatgttttgtttagtagatgattggaaatacaatttaaaaaaatgtttctcactttggttttttkttgttgttgttcctcctttctctcttctttttttttttttctttttcctaggactccttctggtttgcttttttgtttctctttagatagctgtttttatagtcactccctttctttaccttctctagtttagttggtgatgatattgctcttgtcactgaacaatagctgaagagagcccatggtcacggacctaaaaagatttctggcagcactttttattaactttgggttgaattaagggattatgagtactccccccccccccggtttttaacttaatttttaaaaatagtgttttagttagttttttctttgttttattttgagatagagcctcaccctgtcacccaagctggagtatagtggcactatcatagctcacagcagccttgaactcctggcctcaagagatcctcctgcctcagcctcccaagtagctgggaccacaggcatgcatcactgtgcctggccagttttttagtattttaaattacggtgccagttatactatagttatttattttttgaatgagatggggtcttgctatgttgtccagagtgctctctctcaaccttcccggctcaagcagtcttcccatctcagcctttttctcaagtagctaggactactactatacattttattctacaactttctttttgtacttaacactaatatcatggtgatctctttacctgagtacatatggatcttgcatcccttatatagctttgtaatattccttaatatgggtggactatattttaatagttctgtattgattctaatgttgcgctattaggcagtattgcagatacatccatgtgcatatatctttgtatgttggtgtttatatctgtagtgtagattcatagaagtaggatatagctcagttttaacacaaagccctaaatgttggcattataatctaagatattgacagccattgaaggttaattttaatttttaaaattaaaatagaagaaaacacatggagccaggtgtggtggctcacrcctgtaatctcaactctttgggagactgagccaggaggattgtgtgaggccaggagttcaaaggtgcagtttgatatgattgctcctgtgaattgctactgaactctagcctgggcaatgtagcgagaccctgtctctacaaaaagacaaacaaaaaaaaaaaagaagaaaaagaatgatttggccaggcatggtggctcactcctgtaatcccagcagtttgggaggccaaggtaggaggatcacctgaggtcaggagttcgagaccagcctgaccaacgtggtgaaaccccatctctactaaaaatacaaaaattagctgggtgtggtggtgggtgcctgtaatcccagctactcgggaggctgagacaggagaattggttgaacctggtaggcggaggttgcaggttgcagtgaactgagatcgtgccattgcgttccagccagggtgacaagtgaaactctgtctcaaaaaagagagaaaaaaaaaaaagaatttatggaagatcatcttgaggcccgtatcattcggatgttcctcatctgtgtttatttcaacataaatgtttcttaggctttctgtttttaattaatggctcattgtagattgagtcaaaatgaaacaatgtattaaaaaaatttcaagaaaacacatgaggctgggaatgactgcacatgtttgcaatcccagctacttgggaggataaggggggaggataaggtgctttagcccaggaggagttcgagattaaccagggcaaagtagcgagttcccatctcatatatattttttcctttaccaagtggtatctataaaaggtcgcagcctccatgattaccagagatgttcagttgaattagatggtcacctaatttcctccaactgctttgagtgcgtacttgatatgcacttggaggctcttaagctgttaatgtcatgaactycttagtgatttaaaagttaagaaaaaaactctctttgtagttctatgtggtagtgctgttcttgattacaaacatttgggaaacttacaattcaagttattttcctgaatttttaagttgcagcaaattggcctggaattttatcacttcccattgtcgtgtagcaggctttccagactgcttttgagaattgaattgaaacaagactgatcatctttgacagtatactttatgtacctttcttccatattaaaaatagtaaagttaaatttatttgccttttatttcatccctattatgatttctaaattgactaatagagaatttcttttttccactctcacccaggctggagtgcagtggcgcgatctctgctcactgcaacctccacctcccgggttcaagcaagtctcatgcctcagcctcctgagtagctgggattacaggcatgcaccaccactctcaactaatttttttgtaattttagtagagacggggtttcaccatgttggccaggctggtctcaagctcctgacctcaaataatcctcccacctcggcctcccaaagtgctgggattacaggcgtgagccattgcgcctggccgagaaatattttcctaatacaatatataatatgagctctcttgaaagtagcatctgagaattttgaaaagaatgaatacattgtaycccctaagaagaggagcagtgtggaatttttagtttgtttwatctacccattgccgttgaaatggtgctggttaataggtacaggtagacttcaaaggaggaaagtgtttctttgtcccctcaaacttgatcacattagagagaatgagatatagagaaattcaaacatttctggaatttgtctttatatcattgaaccataggactgtggtagattatatagtgctcctagctttctgatccttgactctaacattgattctacgtgtattgcaaattcaaatttcccagtttactttggaaataccattatagagagtattccttattggcatttagcaaggaatgagtgagtctatatttgatagttggactgggcaacttgcctctagcagtgtgaaacttgatgtatgtaatgtaatcttcaaatcatgtagctgacgtgaggaactttttaatataaagtttaatgtcaggattttattcacattacagttctgctacttactggctatttgaccttaggcaatttgctttatctctgaatgtcagtttctgtatctgaagaaggaagtgataattcccatctcatagggttactataaagataaaataacttcaagctctgtaaactactgacataaggatttaatttgtaaagttactcttctgtactactaaagtaaaactagttttccaatagtttgttgcaggataagcagttttacttttgttgacaatatgtgtatgaatttacttctgtagttcaactgcaagtgaaaatgaccatgtaagcatgtagcattcagataattttcataagattactgaacataggccaatattgattgtatagtaaactgtaaggggtgcagtgagaagactttagactttaaaactgaattgtaatttatttaggatctcattgtgatattcaataaaaataatattttttccctcttttttcacttttagtatcgttacccctgtgagtaaattacattttcgtgtgtggagtcaccagacactgaaatctgatgttttgttgggaactgctgcattagatatttatgaaacattaaagtcaaacaatatgaaacgtatgtatgtaagactaatagaaattgcacttagctgtttgtttttctggaagaaatttatatgtcaaacatgcataatgactcatgttctctcatacttttaagttttacttggttataggatgaacagatagaagaattttacactattgaaagtattctgagtaaccttggtttgaccattcattttggattcagtatttttagtaaatatttatttacttagtaaatagatattagtaaagtaatacatatttaattgtggaaaaactaaaatatagagcagagatgaaagaaaaaaataaaaatcccacttcagagacaaatcaaatgaatatttttacagatttccttttcagatgcttttttttttgggagggacatggggagacaaggactcactctgttttccaggctggagtacagtggctatttacaggtgcagttgcagcacagtgtagttttgaactcctggcctcaagtgattatcctgcctcagcctcctgatatatctgggactataggcaggtaccaccacatccagctttaaatgcttatttttaaaaatgtcctcattttatgaggttgtggttttatttgtatatgtatatttatataatgtagaaatatgtgtagcttgttttaattaatatatcattttaaaacacatttttttctacccctcgactatctaaaacatacttctaaaaattttctcatttaggacttattagatataatttatccttaaattatgtttttactcaatttaattcaggtatatattactaaataatccttattcttatgctagcccattttatactatagtcttacaaggatggaatgaacataataaacgatggagatactattttacatcatgaatatgaaacattagcatattttgtcctttttaaaagatacagtgttttggtgtcaaaagtgttcaaaccttgggtgaaacatagttaaacagtttatatgcacatatagttatattttctcggacatcacatttttaacagttaatttttaacagttaagatgccttaactgggaaaaaagtgaccattttttctgtaactttattttcttccagttgaagaagtagttgtgactttgcagcttggaggtgacaaagagccaacagagacaataggagacttgtcaatttgtcttgatgggctacagttagagtctgaagttgttaccaatggtgaaactacatgttcagaaagtaagtgactacctttttaaggtctttaatgattcttcttaaataaartagccattgtagtatgctgtatgtaattattttgattttttttttcagattaataaaatgtttttttctggccggtgtggtggctcacgcctctaatcccagcactttgggaggctgaggcagaaagattgcttgagcttggaggttgaggctgctctgagccgtaatcacatcactgcggtccagcctaggtgacagagtgagaccttgtttctttaaaaaaaaaaaaaaagaaatgatttttttctttttaaaaaatagacattgatcactttaaacattttctttttagtgtattatttctgtgaataaaagcatgtatatttttacataagttgaaaaattagccaaatagaagttgaatcacatttgcctccatgagtaatgagttgatttatatagtatttattctgtaggccaactatggcagttaatatgggttagatgccacaccgccaactgtgccaatggcagacagagtttattgtctgtagcagtgtggggctgagtttaaatatgactttaaatccttttttttttttttttttttttttttaagacggagttttgctcttgttatccaggctggagtgcaatggcacgatttcggctcaccgcaacctctgcctcctgggttcaagcgattttcctgtctcagtctcctaagtagctgggattacaggcatgcgccaccacgcccagctaattttgtggggtttttttgtttgttttagtagagatggggtttttccatgttggtcaggctagtctcgaactcttgacctcaggtgatccgcccacctcagccttccaaagtgctgggattacaggcgtgagccactgcatccggcctctaaatccttcttaacactgtaccacccagccattacaagctgagatccatttaccattccccttctacttctgtaggctacacttacagagatatcttttgacaatactaattcattatatgtgtgttagtaaatcttacaatctctgatttactagtgtgtgttaaaggaaaataaactgtggtggcacctgagttagtggctacacagctagcatatttaatagaactttttcctactgttttcccatcagatatttccatcacttcctaatgtgttaagtgtattttcacttgaaacatagattttagaggcctgaagacaatgaaagagcagattaatggatttcttgatgagtttgacgaagatcttttggtttacttaggaactgcattatgaaacattttgcagctgtcaggtgctattctttttctactttgttgaaagacttcctacttcctctttgactcatgacttttaaaaatagcaggacaggctgggcacagtggctcacaccccttgatcccagcactttgggaggctgaggcaggagggttacttgagcccaggagttcgagaccagcctaggcaacataacaaaaccccatctttgcaaaaaataaaaaaatttgccatgtgtgtggcacgtgcctgtagtccaggtacttgggaggctgaggtgggaggatcacttgagcccaggagtcagaggttgcagtgagcgaagatcacaccactgcacttccagcctgggtgacagagtgagactctctctcaaaaaaaataaagtagcaggacctaatatgtcttccagattagttctctggggctagtgaggatggaaagaaatttctgaaatggttatactgatttggagttgacactttgattattgttcacaagaactctataatagtcacatttttctatacataaattggaagtctggaagataaaatacaagttacattgttaaactgccctaaacctcagtatttatagtgtcctaagcttcgcccatagaagatgaaactattactaatgtaaaatatttaataattgctggacgcggtggctcacgcctgtaatcccagcactttgggaggccgaggtgggctgatcacgaggtcaggagtttgagaccagcctggccaacatggtgaaaccccgtctctactaaaaatataaaaattagcctggcctggtggcgagcacccgtaagcccagctgctcgagaggctgaggcaggagaatctcttgaaaccagaaggtggaggttgcagtgagccaagatagtgccactgcactctatcctgggtgacagagcgagactctggccaggcgtggtggctcacgcctgtaatcccagcactctgggaggccgaggcaggcggatcacctaaggttgggagtttgagaccagcctgaccaacatggagaaacctcgtctctactaaaaatacaaaattagctgggcgtggtggcgcatgcctgtaatcccagctactcgggaggctgaggcaggagaatcacttgaacccgggagttagaggttgtggtaagctgagatcatgccattgcactccagcctgggcaacaagagcgaaactgggtctcaaaagaaagaaaagaaaacagttataacaatatactacaataaaagttttatgaatgtcatctctcagtttcactttcactccaaaaatacctcatttttttagctttgtttggacctttggggggaaaaataccttattgtactcacctacttttggaccacagttgactgtgggtaattaaaaccatagctaaggggaggcctactgtacttacagacacatttttggttctttctttttggtggataaattttctaaaaatggcagttatataaataaactttttccaagtgaaacaaagtgtacttgttttttctttttctttaagttgtattttaaaactagctggctttatattcccctactttcaactagtttaatatctcgctacaagtctcggttataatgttttctttacataatttgttatggtgttttccttcaatgaagtacagagttaatctgctttcatgagtctctaggaagaggtcttcctagacctcttcctagctttttttttttttttgagacggagtcttgctcttgtcacccaggctggagtgcagtggcactatctcagctcactgcaacctctgcctcctgggttcaagcgattctcctgcctcagcctccagagtagctaggattacaggcatctgccaccacacctggctaattttaatttgctatttaggtagacttttttttttttttagatggggtttcgctctgtttgcccaggctggagtgcaatagtgcgatctcggctcactgcaacctctgcctcccgggtttaagtgattctcctatctcagcctcccgagtagctgggtttacaggtatgcaccaccacgcctggctaattttgtattttttagtagagacagggtttctccgtgttggccaggctggctttgaactcccgacctcaggtgatccgcctgcctcgacctcccaaagttgctgggattacaggcgtgagccactgcgcccggctgacttttttttttttttttgagacggagtatcgctcttgttgcccaggctggagtgcaatggcacgatctcggctcactacaacctctgcctcccgggttcaagcagttctccttcctcagcctcccgagtagctgggatgacaggcatgcgccaccatgcttggctaagttttgtatttttagtacagatggggttttaccaagttggccagggtggtgtcgaactccggacctcagttgatccgcctgcctaggcctcccaaagtgctgggattataggcatgagccactgcgcctggcccagctttttttttttttttttttttttaaaggttgacttattcttatagcccacagatctgaagtaacaaatcaggtgtgggcagttcatatctgccagaggttctcattcatctttttttttcttttygtgggatggtttttttggtgagttgtttagtacyagtcttcccatttatgacctctaacaagaaacacagaaaagtattattgccaaagactaatactagttttcctaaagagaaagaaaaatgcattttactttcaactttttttttttttttttgagacagggtatcgttcatttgccaagggtggagtgcaatggtgtcatcttggctcactgcaacctccgcctcctgggctcaagtgatccttccacctcagcctccccagtagctaggactacaggcgcactcagccacacccagctaatttttgtattttttgtagacaggttctcactctgttgcccagggtggtctcaaactcctgagctcaggcaatcctcctgcttcggcctgccaaagtgctgggtttataggcacgaaccaccactcccggccacttttaacttcctgattataaaataggaacatagtcttgtagagatctttactttttatcatgtatactctggatgtgtttaaaattaatttagggagagtttttggaatatgtgacttctggttcttattctatgcattccattccttttaaattttgatgctttgttatgttaggctctagtttttgtagttccgcttaacgttagggtaaaccattttcatatgtgaatatattgataatgtttcttactagaataataaattctaagaaagtagcctaaattttttgctttaccaaatattatttgaagttactagatctcaactggtctgggtaccaactaattttatagagataaactttgctgtaatgttagttttaaaaatttgacttacatttgaacatacgtctatgtatgctcagaatattaaataatttacttccccacaaaaggtagtaaaactcctttctttctttttctttttttcctttttttttttttttttttgtgagacggggtttcgctcttattgcccagactggagtgcaatggcgcgatctcggcttaccgcaacctccatctcctgggttcaagcaattctcctgcctcagcctcccaagtagctgggattacaggcaagcgccaccacgcccgactaattttgtatttttagtacaggtgaagtttctccatgttggtcaggctggtctcaaattcccagcctcaggtggtccatgtgccttggcctcccaaaaagtgctgggattacaggcatgagccaccgcgcccagctgtaaaactcctttcaacatgtatgttatgtttttgtcttactttatgagaggtactgtaaaaattgaagtattgaggctatgatatggtcattgtgaatttcagtgaagactactgtgttcttcatttttacaatttacaaagcccgttgttatatattctcatatttaatatgtgtaagatataaaataaaatgagcatccctgaaactatcacacagcttaagaattagagtattaacaatatcattgcatccacctgtatttttcttcctatattattcctttcctttcctttcgagataatcactattctgaactttgaatttgtcatttctgtggtctttaaaagttttatcctatgtgtgatatataagcattacttgtacgtttctcttgagctctatgaaaatatcagtgttgccttttttttttttttgagacggagtcttccactgttgccccggcttgagtgcagtggcacgatcttggctcactgcaacctccttccgggttcaggcaattctcctgcctcagcctcccgagtagttgggattacaggcgtccacgaccacactcagctaattttcagtgttgcctttttctttttttgagacggagtctcactctgtcgcccaggctggagggcagtggtactatctccgctcgctgcaagctccgccttgccggttcacgccattctcctgccttagcctcccgagtagctgggactacaggccttttaagatttagtcatataattgtgtccgtaggccattcacttttactgctgcatagtaatctgttgagtgaatgtaccgggttttaagatttttatatcaaaggacatttgcttagctttttttttttaaaccatgtgaacagtgatacattgaacatttttgcatatgtttattaataaacagatttaacgtttatgttgggtgtatgcttgagagtagaattgctggggtatgtttattttcagctttacaatattaattgcttcttcaaatatgctattaggatatttaaaactgagatgaaatttacataacatacaattaacggttatataaagtgtacaccttaatggtgtttagtgtattcacagtgatacacatccaccatctgtctctagtttcagatctttcttgtcaccttagaaaaaaaaccccatttctttcttctcccaagccgtgataactgctaatctgctctctgtctctatggatttgcctattcaggatatatcacataaaaggaatcatgtgactttttttgtttggattctttacttagcataatgaatttgaggttcatccaagttgtagaatgtgtcagtacttcctttcttcttatggctgtatgatagttctactgtgtatatttgtgccacaatttgtttatccattcattcattgatagacatttggcttatttccatttggctgttatgaattataaataatgctgctttaagcatttgtgtacaaggttctgtgtagaaatatgttttcatttcttttggatatatacctaggagtagaattgctgatgcttgtttttgatagtttctcatttcttccttgtaattttttttgatacataggaattttttttaaaacattctccatttgataattccagtgtctgaaatccttgggtatataaatggttttttgtctcttcctcattgaggtttgttttcatttgcgtttgttcttcgattgcaagtttatatttgatcttaatctgttggaatcttaagggcctaaattggggattctttgccccagagaacatttcttttgcttctgctagttgctagggtgtaccactgaactgggaacgcttcaactcctttcctacctgtgtatttgtaaaatggatcagacccttgccagcctaatgtggcaggctctggttcagcaccacaggtttgctgctggcccaaggctttctaatccatctgaggattgaaaatggccctctggataacccagtttttcacatttgctcactgcatacttgtgtcygttcactttgtttttttatttttgagacaggatctcgctgtgttgccagactagagctcagtggctattcacaggaacggtcatagcacactgcacctttgaactcctggcctcaagcagtcctcctgcctcagctttttgagtagctgggacttcaggtgctcaccaccatacctggcttcagttcacttttttgtttttgagattgctagacacccaagaaataggaacgatgtgttaaaacgctttatctaggagctagttattttgtggtgggagggcaggtcattttgacgagcttactgagtagaagagatctttgtagatcttccaaagtttcttgtgggtaaaacatgtgcatttagcaatctgacaaattttcttgaggaaatttggattgggaatacctttaaagggcaatacgtttgtaaaatgcagtggttaagaacaaccattgttctcttcttggacgttcattgtataagtgttagatttttgttgttgttgttgttgttgttgttgttaactattctctggttgtaagcagaggataagatctaaataatttatgccatacatttcatagttatggcttcactttatattggagtgaaataaaagagtgaatattccaggcatggtggctcacacctgtaatcccagcactctgggaagccaaggcgggaggatcacttgagtccgggagtttgagaccagcatggacaacatggtgagactccatgtattcaaaaaaatctttaaaaaatgtagctgattttgtggtggcatgcatccatgcatcctcccactttgggaggctgaggtgggaggattgcttgagcctgagaagttgaggctgcagtgagctatgaccatgccactgtactccagcctggacaatgcatcaagaccctttgtcaagaaaaaatatgtatattgaaaaatggcccttgtttagactttcctaatgagatgtaaattttgagaaataatagttattatttatggactgcttatatgtgctagcactgtgctaaatgtttacatgtttaattcttataaatactctatgaagtaggtgtcatccccattttatatatgcaggaaaagtacaggaagtcaagtgtacttttgtaaggtcacaaagtacatgataaagctaggatacaaacctaggcagtctgccctcagaactcatgtgattaaaatactgttctttgtcactgtagtgagaaggttttagaagtagcaaataatggtagacttaaatggattattcctaatgattttcttaattttgagaaaagtgaaatactaatagacacattttagtaacttatgctggatattttgttgtggttttctgatttcatttatgtcccattcataagccattttaggggactatattccatattaaaacattcttaaactgaaatttaccctttatagccaaaatgtatttcattgtaccattttttttttaccacattaacatctttattgagttgtattttatacaacataaaatttacccatttcaagtgtacagcttaatgaattttagtaacttaagtgagggattcaactatcactgtaatttaggtttaaaacatttttatcccctcagtaaaatccctcttgcctgtttacaggagcttcccttctcactgtcagccacaggcaaccaccactaatctgtatttttttttttttgagacggagtttcactctgtcgcccaggstggagtgcagtggtgtgatctctgctcactgcaacctctgcctcccaggttcaagtgattctcttgcctcagactcctgagtggttgggactacaggcgcccgccaccacactcagctaatttttgtatttttagtagagatgaagtttcgccatgttggccaggctggtctcaagttcctgacctcaggcaatctgcccaccttggcctcccaaagtgctgggattacaggtgtgagccaccacgcccggcctctattttttatctctaaaaattcgtctttttctggacatttgtataaatggaatcataaaatatctgttttttgtgtctggcttctttcacttagcataatgtttttgaggttcatccatgatatagcgtgtttcattagtttgttctcttttattaccaaatagtaataattccattgtatagacaacattttattcacatactatttaaagataatatatttctagactggatgagacatttaccaactttgctaagtatggtatagtatagtggtgactcagtattttttaaattaatccaccaattatgcttttttgtaatatggtaataatttccctgtttaaactatgattctatccagggcctattgttcctttactaaatggacctaggtggtcgaacttgagttcttgtttctacatgtgatcatttttctttctctttccctgtttaccatttgttttgcttctttaaatgtacctacctttagcaccctccctccaacacttttcttttttttgagacgggagttttgctcttgttgcccagactggagtgcaatggcgcgatcttggctcactgaaatttctgcctcccgggttctagcgattctcctgcctcagcctcccaagtagctgggattgcaggtgcctgccaccactcttggctaatttttgtatttttagtagagacaggttttaccatgtaggccaggctggtcttgaactcctgacctgaggtgattcgcccaccttggcctcccaaaatgctgggattacaggtgtaagctgttgcacctggctcctccaacactgttacagtaaaaagatctggactgaatcctaaggatattttccatcaataaagcaagaagaaaataagaatattgtggcattaatttttggcaacttggattcccatttgtggctttcctaatttttaagctgttttccaggcccctgcaataagagagacgttatgggtttttctgtttctggaatcgattttattctgctggcgatcagcacttttttatgaggtatttgggatacaaagatggttaaaacactaggtttaaattagagttagacatatttcaaaaaaaaggcaggaatagtagtgcatgagtaatatacctttagtaattaacatccygtatccattaattattaagcatttgcacaaaattttggcagactttttttgcagtcatgaaaatcacatttttccttttaaagtcatgttggaatttaagttatagtatgttctttattacaaagatttaataaaaggctttgcttacatggcatgtttagaaaagaaaaaacatgaaaactactctcttgaaactcattttctgtttaaactttgatgttaaaggtgcttctcagaatgatgatggctccagatccaaggatgaaacaaggtaagcattcactgattgcttaccrcagaatgcggagagatagatttcctaaatattcattttagtgtaaacttcaggttcatgatataagaataaatgagtgtcagaaagaattcagaactcaagaagggaaatatttgcaaaagattgaagactcttagcttatcggattagagctatctggagtgggctagggawarccaaattgttgatacttcttcagcttgtagaaaataaatatactggcaccttttcagaggcagggtgttctaaactccagagccatcattgggctgttaagtttcttttccagaaaaactgagataggagctttacacatatgtgaaggtcaccactagctatggtatcatctgggccttcattagaaggggcagagctttgtaccagctgtttgctgttagcccaggtttagcactttcatgtgcctatctgcgttcaagtttggacctaaatgtggggaaaagaaagaaagatcagtttgttactgtgtctatgtagaaaaggaagacgtaagaaactccattttgatctgtactaagaaaaattgttctgctttgagatgctgttaatctgtaactttagccccaaccctgtgctcacagaaacatgtgctgtattgattcaaggtttaatggatttaggtctgtgcagaatgtgccttgttaacaatatgtttgcaggcagtatgcctggtaaaagtcatcgccattctccattctcgattaaccacggacacaatgcactgcagaaagccgcagggacctctgcccaagaaagcctgggtattgtccaaggtttccccccactgagacagcctgagatatggcctcgtgggaaaggaaaaaccttacatcctccagcccaacacctgtgaagggtctgtgctgaggaggagtagtgaaagagggaggcctctttgcagttgagataagaggaaggtttctatctcctgctcgtccctgggaatggaatgtcggggtgtaaagccaaccattcgttctattctgagataggagaaaaccgccccgtggctggaggtgagatatgctggcagcaatactgctctgttactctttgctacagtgagatgtttgtgtaaagtgaaacataaatctagcctctgtgcacatccagacatagtacctttccttgaacgtattcatgatacagattcctttgctcacatttttccctgctgaccttctccccaccatcaccctgttgccctgccacactcccctcgccaagatagtaaaaatagtgatcaataaatactaagggaaatcagagaccagcgctggtgtgggtcctcacacgttgagcgccggtctcctgggcccactgttctttctctgtactttgtgtctgtgtcttatttcttttctcagtctctcgtctscacctgacgagaaatacccacaggtatggaggggcaggcccccttcatctaaaaggtgttgaaagccttggactatgtgaattaacttagactgcttattggttatcctggaaatcggtaacagcagataaaattaggaaaggagatgattctgcttttaaagtagtgagtggcatgtcttaaccacagagtgcagtgattataaaattccatttgattctttgtttttctcaaattgcataagcagtgwgtaggaagaagatgatgaaccacaggaggagtagtcagaaggggagaagaacgagaaaagtaatgtcacagactgtgagggaaaattatccacaaagatgggatgttacagtgtcagatgctgcagaggaggataggtgaagaaagtagaacaaaatactgatggttgttgaagctgtgctgttaggtacatgggagtttattgtattagtctatctgcatttgtcatctatgggttgttttttttttgttttgtttttttgtttttttagatggagattcactctttcacccaggctgaagtgcagtggcgcgatctcagctcactgcaacctccatctcccgggttcaagcgattctcttgccttagcctcttgtgtagctgggactactcaagacaggcatacaccaccatgcccggctgtttgtatttttagtaagagatggggttttgccatagccaggctggtcttgaactcctgatctcaagtgatctgcctgccttagcctcccaaagtgctgggattataggcataagccgccatgcctggccgatagatatatggaagttttttggtttttttttttgttttttgaggtgttgtctcactctgtcacccaggctggagtgcagtgacacaattttggctctctacaacctccacctcacaggttcaagcaattctcctggctcagcctcccgagtagctgggattacaggcacccgccacgatgcccagctaattttttgtatttttagtagagacggggtttcaccatgttggccactatggtctcattcttctgacttcgtgatctgcctgcctcagccttccaaagtgctgggattacaggcatgagccactgcacctggccaatatatgaaggttttcataataaaaagttaaagacaactcatcaagatctttaggaaaatcaaagtttataaagctgttgtgtcttacctaataggtatctgctttcacattcttatgatgaagaatcatctatactaatctcacgagatgtagaatattaaggagcagtaacttcttgcctagaaaatagcagatacttttattctttactgtgattaaaatcaatggggccggtcatggtagctcacacctgtaatcccagcattttgggaggccaagacaggaggatcacttgagcctaggagtttgagaccagcctgggcaattgagtgagacctcatctctacagaaaacaaaacaaaacagaaaaattaaaattaaaaaacggtagttaggcctggtggcacgtgcctgtagtcccagctgttggagtggggagggtgcccaaagtgggaggatcacttgagctggggagatcagtgagctgagatcgtgccactgtactcagagtgatgacagttagaccctgtgtcaaaaaaaaagaaaagcaataggacaggtttaaaaaattacataaatatctgtagactgaatactattatgtctcttttgtctttttttagtattattatatttagtagaagatttcttgaattcctgaaagttcccgcataaaatgttttagtatttcagtttgctttggtcatttacctcttcttttacacaataaacctgtatctttgtataataagtgggtatgtaaaaggttctgttatgccagtgtgttgttgcttgtttgttttctgcaagtctctttcttaacagtattttcatcaaaccacttgtactctggacatctttaaatttattataaaggcattgctggatcccctacttaatgctatttaatcaatgctttttatcttcctaagtgaatcattgtcataaataatttggggaacaatgtcttctgggtttctgagactgcctgacaaatctttgagtatgtcttttgtgttaagcataagttcctgtgcatcagcttttattccagagcacacacacctttgagatgacaggtttgaaaagcattttgtaaactgtcaaaagctgtttaaatgttactacacaataatgagtagtagtcatagctgtgactgccttttctcctttgcttttgtttgcagatttcatgactataaaactaaaaggcagggaagtatatatgtagtggacaggtgcttcgcatccttccctccatcctcatagttatcgtttaggaagtttactaatagccttaggttattttagcttttgatcttaattcaagcactgtctgtatcataaatgtgtttattgatctgttttccccacagcatgtctggatgttttatgtttctcagtgttgtcttctgtttatttgtttatttttatgaagtaccaagattattggtgcctgattttcaagattttgtcrttagatgtgcgttctttttttttgtttttaagtttattattatattttaaagacaggctctcgctctgttgcccaggctggtctcaaacttttcacctgaagcatttgccctatctcggcctcccgaagtgttgggattacagacatgagccaccacgcccagcacatgtgccttcttgattgttactctttgatttgaacatttatgacctgattgtactataatagcattttggttgtctgaggttctctatcctgtccataacttatgaacttatttataggtcagatgtatatgtatgttgaaattagcagatgtttgtaagattgtggaataggggaacaaagttatagtagcacataattagcagctaattgcttttctttttttacttttttgtttgagaccgtgtctcgttctgttgcccaggctggagtgcagtggcgtgatctcagctcactgcaacctccacctcccggattcaagtgattctcctgcttcagcctttcaagtagctgggattataggcatgcaccaccacgcccagctaattttttgtatttttagtagagatgaggtttcaccatgttggccaggttggtctcgaacttctgacctcaagtgatctgcccacctcggacctcccaaagtgctgggattataggtgtgagccaccatgcccagccagctaattgcttttcaaagccaattggtggtgttggttccactgacaattctgtatactgtatagatttccggattgattttcaaaatctatttttagttttagcctcacactttactaaaataacttaaacttattaaaataaataaaataaaccgccagtactattttagtatggccctgcttctcaaactttagagcacattagaatcacctggttcattagatttggggtgggactcaagatttgcatttctaacacatttccatgtgatgctgatgctgctagaccagggtctacattttgagaacacaatggttagacacacacgtttttgcaaattataactattctgggaaataataacagatagtaaaaacagacttcttatataatttttcattatataagaagtctgtttccccaaagtccgagcgtgcagaatttgctagaactgtcaatctgtcttaatttcatacccttttgagagctgctttgaatcttgttttttttgaactgttgtttttatgtttattattagaaaataatacgattgttttaaaagatgtaaattaaatagtgtgtaaagtaraatgtataaagccttaatagaagaaataatatttgacctaagaccttaaaacagagctataaactgtatatgcatgtcttagaggaattggagggaagaaggaattctaaatggaaagaagaaaaacaaaggtggtgagaaacacaggttgttttgtaggaaatctttaatcataatatttggctaaaggtgcagtaatttcaagggagaaatggcatttggtgattagaaagtagaatcagtcaatatatatttatttgcctttatatgatagacactatgctcaacatgtctattcttccttcagttagtccttaaacgtttatgagttaggtactattgtctcatttttataggtgatgagaaaacargcttagaaagggaaaggaacttgcttgagttaatagcgttaagtgggacagttgaacctggaacagccttaccttcagagcctgagctcgtaactatcatgctttactgccacctgaagttgggatgatatacaagtaagtgcttagccattaataaatgttatttttattgttagataggttgggaccagatggaggtttgcaagtaaagacttacggaattttttttttttaaaggaaaggaatgtcttttaaaataatttgattttgttctgttttgttttgttttaagactgagttttgctctgtcgcccagatgggaatgcagtgacgcgatctcggctcactgcaacctctgcctcctgggttcaagcagttttcctgcctcagcctccgagtagctgggattacatgcgtgcaccactagacttggctaattttttgtatttttagtagagatggggtttcaccatgttggccaggcttgtgtcgaactcctgacctcaggtgatcttcttggccttcttggcctcccaaagtgctgggattacaggcgtgagtcaccacgcccagcctaaaatatttgaacaggagattgtatgatcagaactctgtaggaaaaaatattttgacagtggtatatagtttggattatgtggtggtgagtgaaggttgaaagtcctatatggaaatttgttacaataatctattgagaggtaacgaaggctagaactgaggcaatgatggtggaagagtagagggagaatgtgaaagtgggatcaacaggacttagatactgagtgtcaagaggcacagggaggaaaaatgtaaaattgcctgggaaagacagcagtatcgttcatagaaccaaaacctaagaaggaaggaagaccataggaagagaatgtttagagggacgggaggacctggcagggcatggtggctaacacctataatcccagtgctttttgggaggcccaaggggaagattgcctcagcccaggagtttgagaccagcctgagggacaaagcgagaccccatctctacataaaataaaaaattagccaggtgaggtagcatgctcctgtagtcccagctactcaggaggctaaggcgggaggatcccttgagcccaggagttcaaagttgcagtgaactgtgattgcgccattgcactccagcttgagtgacagagcaagactcttgtctttaaaaaaaggaagaaagggagggccttgggatgggagagttattctagatctcctgcatttagttgataatttgatactrgaggatgggagtgagataaagagtagagattgatttgggaatcattctctgagataaccttagaaatcatggaatttgagatcctagggaaaaatctgtggagaaagaaaaggagaacaagaacacaatcatagagacctatatttagtggatggtaggaagaggacaaaccaaaaaagggatgatgagaagtgggagtacaagattacaaaagcactgtcacagaaattaagagaaaaatgttctttaaaagatgggacatttggccggtggcggtggctcactcctgtaatcccagcactttgggaggccaaggtgggcggatcacttgaggttaggagttcaagaccagcctggccaacatggtgaaaccccatctctactaaaaatacagaaaaaagttagctgggtgtggtggcatgcgcctgtaattccagctactcaggaggctgaggcaggagaattgcttgaacccgggaggtggagattgcagtgagctgagatcatgccactgcactccagcctgggcgacagagcaagattagattctatgtcaaaaaaaaaaaaaaaaaaaaaagatgggacatttaacactatcaaacgctgcaaaagagaattaagtcttagattaataagctagggaaaactggctgtttggaaaaagaaaagaaaaatcaggttaacgccttagcttatcccaagatgagagtagattcgatgttgacttttaaattgattttaaaaaattaaactaaaacctctagaagaaaatatgaatagttaattcattgctgaataaatttagctatatagaaatataaaactcttataatttaaaaatgtrttatcaaaagcaaaggaaatatttaaccaatatgagatgctcagtattctcaggttgtaaagatctcttaaaaataggcaaaattattcccttgtaatagataaatgtacaaaaaacatatatatagttcatgaaagaagaaactgtaatgacctgtaattatatgaaatattgttcatctttaattttaaaaagcattaacatttttgcttaccaaattggcaaagattttaaaactttatggtgaaatgggtgtttttattttgcggtacataatttgaaaatgtccagcaaatgggagaacrggtcaattattacctttaaaactattttttagggccaggcacagtggctcatgcctgtaatcccagtacctttgggaggccaaggcaggtggattgcttgaatccaggagttcgagaccagcctgggtgacatggcgaaaccctgtctctactaaaaatacaaaaaataagtccagaatggtagcctgcacctgtagtcccaactacacaaaaggctgagtcaggagaatctgtggaacctgggagatggaggttgcagtgagctgaaatcatgccactgcgttccaggctgggtgacagagcgagaatctgtctcagaaaccaaaaacaaacaaacaaaaaaacactattaaaaagaaacaatttaggccgggcgcagtggctcatgcctgtaatcccagcactttaggaggctgaggcaggtggatcacctgaagtcaggagtttgagaccagcctggccaacatggtgaaaccccgtctctactgaaaatacaaaaattggccgggcgtggtggcaggtgcctgtattcccagctacttgggaggctgaggctggagaatcgcttgaacccgggaggcggaggttgcagtgagccgagatcgtgccattgcactccaccctgggggacaagagcgagacttcgtctcaaaaaaacaaacaaacaagcaaccagtatttttcagctttcaaaatatttgcatgttttgacttggttgttctattctgcagtctgtctaaaagaaataagaaatccaggcagggcatggtggctcacgcctgtaatcacactttgggaggccgaggtgggtggatcacttgagcccaggaatttgagaccaccctggtcaccatggataaaccctgtgtctacaaaaaatacaaaaattagccaggtgtggttgggtgtgcctgtggaataggaggatcacgtgagcctggggaggtcagggctgcagcgagcagtgattgtgcctatgcactccagcctgggcaacagagtgaaacaatgtctcaaaaaaaaaaaaaaaaacccaaaaagaccaatgaaaagaaagcgattaaattgtagtatgtctatatataattttctgcagtcattcaaaatgattttcagtaatttgggggaaatgcccaatatgtattgagtaactaaccaaataaaaacccacccagaatatgaaaccattatacagtgtgtgattgcagtcacatccaatgagaaggactgacaagagatagtcctatgtcttggtggtaattatctccaggatgtaggatggcagataatttttattttataattagaagttacttttgttctttgaaagtctgttttaaaaattaaaatgggggctaggcgcagtggctcatgcctataatcacagcactttgggaggctgaagtgggcagatagcctgaaccctgragtttgaaactagcatgggcaacatggcaggaccttgtctctacaaaaacatacaaaaattagctsggtatggtggtgcatgcctgtattcccagctactcaggagactgaggcgggaggatcatatgagcctgggaggtgaggcgggaggatcatgtgagtctgggaggctgaggctgtggtaaaccatggttgtgccacggcactccagcctgggtgacagaggaaaaccctaagggaaaaataaaataaaatgcactaactatattaactgcattttaaaaaagagtatagtgaaggaaaggggaatgggaagacagcttgaggaacagataggattgaggaaacattttaggtttgggtgcttgattatatttgtagagtaagacaaaaggtctataagaaaggaatataatgaagatgcaagaaagcattaaaagatgttgggcagtcctagaggatatagtctgccatccaggacatgataggcaaatcatccttgaagaaggggagagagactttttcagacatgggaaacagatggagatggttagtggcacagagaaattttaaggtatgggagaaagttgagggatagcagataatcattatttttagggaagaggaagagtcagggatagctacagattggtattagcaatttgaggagatggaaaaggtttgcaaggggcactggggatgggtccaggagtggattagagatgtagaaactgattgatttctaaacaatatagataacccaattaaagttgttgaataatgtcagctgtagccaatgttggcttggtctctttgacataatccagttttaggtatttgaatactctataaatacaaatacatagactgaagcacaattttaatttttttctatcttttgcctaggtctgtatgattgtataggacttagagctttttgtcctaccaaattattaatttctttattcccattaattttaataccagcacactaatctcattaaacccatggttttactactaggttgtcaaagtcatccgtcatttataattccctagctcccaggagtcttgagctgtgattttttggtttgtttgtttttgggttttttttttttgagacagagtcttgctctgttgcccaggctggagtgcagtagcacaatctccgcttaccacaacctcagcctcttgggttcaagcgatcctcccagctcagcctcccgagtagctgggactataggcgcatgccaccatacccagctaatttttgtatttttagtagagatggggtttcgccatataagccaggctagtctcaaactcctgacctcaagtgatctgtccaccttggcctccttaagtgctgggattacaggcgtgagccactgcagccggccgatttcttctttttaataagaggggagaaaagagtttttgtctttaataattggtagtgaaaacctctgaccttttctttactgggcccagtggaaaatttattagaattgtttgtagagcagcctgccctttaatatgctactttacttagtttatttactccactaaaatacacctgacttctcaactggaacattctccagcattacttgttggtctgagagaatagtagtgtaaaaagtagatgaggggttagttgtggtggaagaatttctgggaggggaagcagttgggcaagggtgaaggaattgaaactactagggaaagtagcctatgatgaagcccaagtgaggcgtgaagtgagctgatgaactgtaaagattctggaaggagttgaaggttgtgatgagactgaataaaagatactgtaggaggcaggtagaataaataggaagttgtagttagagggattttagagttcaagatctaggaagaggaacaattctaagtatcaaggaaatttaaggagttgtacrggttatcagatgactccattgaaaaattgagatcaaaatgttataagggtgtacagcattgatgttaaaattccccaaattttaatccccagcaacaaatcatagcatttttggaatcctgtttctgctgtacctttatcatagtaggtttatctcatgcactgaatgttccttctccctcacatatccctaaaacttgtctagcactgaatgtgcaatttagtatgaattttctagctgaaagatttttaggcatcttgtagtcaagataatacattttaggatgcattcttgggtcacataactcatcagtagcagagtcagagctagaaaccttaatttcccaatttttggtctattctactcattgttatctgttatttaaaaagcagcaggaactcttctttcaaactagttaggaacgtcttaaaatagcatggagaggcaatacgcagtcttaaaatggttttggaaacctcacttagaagaagagaagcagtgtcaaagctgactcttcctgcattcagaccatgttctgcaggtagtcaacactaatcaggtgctgactgccaattactgaggtgttccctctattataagcatttggggaacccccaaagtagtgcttgtcataccttactgtccacatatataatctggggatcttgttaaaatgctagctctgatatagtaggtctagaatagttttgaagattgtgcatttctgacaagctcctgtatagtgctcgtccgtttggtttaaagaccacactttgaatagaaaggccctaaaggatttctgtggtacacagtttgaaaatgtcttttaaaatatgaggactggtacgcagtggctcgtgcctgtaattgtagcactttgggaggccaaggagggaggattgcttgaggtcaggagttcaagaccagcctgggcaacatggcgaaaccctgtctctacgaaatacacaaaagaattagctgcgcgtggtggcaggtgcctgtagtcctacctactcgggaggctgaggcatgagaactgctagaacctggtaggtgaaggttgcagtgagccgagatcacaccactgcactccagcctgggcgatggaatgagacgctgtctcaaaaaaaaaaggaaaaagaaaaaaactatgtgaggagagagagatgttaattagcttgactgtagtactttttttcactatgtatatcaaaacatcatgttatactgtttttattaaaaataaatcattgcaatacatgttttacagaaaaaaaatttaatacatggtactgcctctctgtttctttgtttgtttgagacagggtctcactctgtctcccaggttggagtgcagtggtgcaagctcagctcactgcaacctccacttcccagactcaaacaatcctcccacctcagcctcctgagtagcttcgactacaggcgtgccctgccatgcccagctactttttaaatttttttgtacagacagggccttgtcatgttgcccaggctgatctgtcactcctgcgcttaagtgatcctttcacctcagcttcccaaagtgctgcaattacaagcgtgagccacagcacccggcctctgttagttgaatctattagattttattttgttcaggcttattctgaaattcctaggagtatgggttagtactgtgtagtggtttggaggtagtacataccagagccttggctgagacatctgcagactggctacttatgcccttgtttctaatctatgactagagcccctctggaaggaaaaggaatcagctatatttagccaacagtagcagtagctttcagtctgacatttcctgttagtgttcttccctcctttctatccctccagttgatgtcattgctttgaagaaatgacagctcctttaaaaaaagtctgtggttacttctactctaaatcactagctttgaacattttgtgtaccattgtactgagctgggggatatcagggcctagtccctgggaaatacgtgcactttgttctcctagcatgggaaaaccagacctgcctcaaacttgaattaatagccagtggaaatcaagaaacaacaatggtaaagttatctgtgcttgtgataaaatagtgccctaaggattttgagaacttgactttgttcctgttcatatagggccttctgaaggcttatttgaaatatgaaccagcatacctaatagttctgaatggccacaagtgttcctatgcccttggacaacccatcactctatctctagatgaactctgggggttatataggattctacccaaaggctctttatgtatttaataaggctgaccagaaattaaaaagcttttttgaagctcttraaaacttmkaagttttcatcctcctgctgttttttttcttaaattcaaggagtattcattatttccctctcccccttccttttcccctcttcttacccagagtgagcacaaatggatcagatgaccctgaagatgcaggagctggtgaaaataggagagtcagtgggaataattctccatcactctcaaatggtggttttaaaccttctagacctccaagaccttcacgaccaccaccacccaccccacgtagaccaggtttgtattccagctctcaatactcttggaaataatgtcctggttggcaattaatcctcaggtaagtgtcaggaaattcttttaggtgaattttctgcgtgtatttttacatttaagattttggaaaagaatgatctttctgtaggtaaccaaaagtgcctttttcctaagtttttgttcaaggtgacgttactgaggcagtgctctactgagaatgaaaatgacatgtgcgtaatataaagtataggcggtgcagataacatggcaataacattgtacctttcttaaatggtttgtaactataacataaatgtattaaatactcaaggatttggttgcttattcctagtatatcctttaaaaagttagtaaacgaaaacccaacaatgctaaatgacccagattttaaataaaaagtacacaacaaacaagcatattttaggtagtaaaaatgtgaacacctataagactatccacttctctgatagccagaacaaatctttaatcttaccttttattgtttctctctgctaatatgtgggcagggaatgcagtgtagttaaaccaaatattactagaaaagtacattagttctctgcaaataattttaagtgaatttctattcaattatacatcttctcctttttatttttttattttttgagacagggtctcactctgtcacccagactggaatgtggtgacatctcagctcactgccacctctacttcccaggctcaagtgattgtctagcctcagcctcccgagtagctggtaccacagtcatgagccaccaatgcctggctaaatatttatattttttgtagagatggagttttgccatgttgcgcaggctggtctggagctcctgagctgaaagtgatccttctgcctcggcctcccaaagtgtgggagttacgggcgtaagccactgcagccacatcttccccttttatagataatttgattaattgtatattctgagtctttaagatgtctttattataatcttggtgacttcctctagacattgttttgtccacaagtatttcttaaaggtgtaatgtatgactactaactatctgtaagaatgttatttcttatcagaccttccatattataaccaacatcaaaaattggtctgtaatctgcacggtttcacaggaaagcagttttaaggagctggaaaattaataaatgaacttaaaataccaaggaatattaataatttcctattctaaaagtttttatttccagtgacatcagaagatcagagaacctgtacatgcttcgtgattagtaatgggacataggggtagacaggaccgaaaaagtaaacaagcctattaactggcagcgttggttatttcccattacttatttctttaagtaattttcacctgtgcatctacatcttaagttttatatttatcatctgccttttattttttacagttaaaattctatcctgaattttagaaaatgaaagattcttttcctattttccccaaatcttttatagcatctgtcaatggttcaccatctgccacttctgaaagtgatgggtctagtacaggctctctgccgccgacaaatacaaatacaaatacatctgaaggagcaacatctggattaataattcctcttactatatctggaggctcaggccctaggccattaaatcctgtaactcaagctcccttgccacctgggtgagtaactttttaaattaacatatgttgtctttaggattcttcataagcctrcttattaataaggaaaataacagtaaacaacagtaaactccattgttttgatgactgttttttaatttcttttttttttgagatggagtgctctgtctcccagactggagtgcagtggtgtgatcttggctcactgcgacctccgccccctgggttcaagtaattctcctgccttagcctccctagtagctaggattacaggtgtgcactaccaagcccggctaatttttgtatttttagtaggggatttcaccatgttggccaggctggtctcgaactcctgacctcaagtgatccgaccacctcaacctctgaaagtgctgggattacaggcatgagcacccagccaactgtttttatgttattgtaactgattttgggggatctggagtcaaaatgaacaaggaaaacacaccatatttgaaatcttcagggcaaagtggaaaaatatattttttcatcaaaggaccctgaaagttaaccaaggccaattaataaaataatcacctaattccaattgcctttttctttaagggggaaaaaatccctttttaatatcaaactatttttttcatcagaagatcattataggctgggcatggtggctcacgcctgtaataccagcattttgggaggccgaggcgggctgatcacctgaggtcaggagttcgagaccagcctggccaacatgctgaaaccccatctctactaaaaatacaaaaaattagctgggtgtggtggcaggcgcctgtaatcccagctactcgggaggctgaggcaggagaattgcttgaacctgggaggcagaggttgcattgagccaagatcttgccactgcactccagcctgggcaacaagagcaaaactccatcttggggaaaaaagaaaaatcatagcaaagtgatagataattcagaaaactgagaaaatttgtgctcataatcccattttaatctctcctgattattttaagattattttcatagattgtttttaagatactcaggtgtaattttttcttgtttattttttgtttgtttgtttgagatgaaatcttgctctgttgcccaagctgtagtgcagtggtgggatcttagctctctgtaacctccgtcttccgggttcaagtgattctcttgccttagcatcctgagtagctgggattacaggtacctgccaccatgcccagctaattttttttttttgagatggagtctcactctattgtccaggctggagtgcaatgatgcaatcttggcttactgcaaccactgcctcccaggttaaagtgattctcctgcctcagcctcctgagtagttgggactacaggtgcccaccatcatgcccagctaatttttgaattttcagtagaaacggggtttcaccatgttggccaggctggtcttgaactcctgacctcaagtaatccacccgtctcagcctcccaaagtgttgggattacaggtgagagccactgcgcctggccatttctttccactcaaatcctgattataccctgattgagagtgacttcggtatcctaggtagacggacctcaagcctcttcaggaatatgttttctcctagagcagatacttgcatagaagaaattgaattcactgtgtgccactgcctgaagattacatttcttcactttattcctaaattgtatttgtatcatctttctaaactgatgtccttatttgccttagttcaataatggtcatttaatggaaatgcaaagacaggattaaaaagccaggtaactcatgcaagtattttaccagccttttaattttgtatttaagttgggagcagagagtggaccagcacgggcgagtttactatgtagatcatgttgagaaaagaacaacatgggatagaccagaacctctacctcctgggtaagtatctaaatttaaaaagaataattttatttagtcagaattgtggattacaactgtataatcttccctacatttctgttttactttttcttgtcagccctttctctgtccactttgttttgtggtaagtacaaattaaaaagaagagagctagacaactgattaattcagagcctgataaacaatttttgttttcacgcatatttctttcttcttttctttattttatagaaacaacatctcgctatgtcgcccaggctggtttttaactcctgagctcaagccatcctcccacgttggcctcccaaagtgctgggattacaggcgtgagctatcatgcctggccctattttcactcatttctgacctaaagattccttaggtgggctgggcgcagtggctcacgcctgtaatcccagcactttgggagggcgaggtgggaggatcacgagctcaggagattgagaccatcctggctaacgtggtgaaaccccgtttctactaaaaatacaaaaaaaaaaaagccaggcatggtggcgggcacctatagtcccagctacttgggaggctgaggcaggagaatggcatgaacccaggaggcggagcttgcagtgagccgagatctcgccactgcactccagcctgggcgacagagcaagactctgtctcaaaaaaaaaaaaaaaatttccttaacttttcttgtctaagctgtttacctgtttactaatactgtagtttaagtattagtttcttcaagagtaattatttaaatgaataagaattagagcccagtcatatattaaaatgaagttcttattatatttaaaaaactataatagcaaaatcatttcaaattaattggggaagttaaggatatattaatacatggtgttaagcctttaacattaacattaacattacagtccaggcacggtggctcgcgcctgtaatcccagcaccttgggaggctgaggtggggggatcatgaggtcaagagatcgagaccatcctagccaacatgttgaaaccccgtctctactaaaaatacaaaaattagctgggtgttgtggcgcgcctgtagtcccagctactccggaggctgaggcaggagaatgacttgaacctgggaggtggaggtgcagtgagctgagattgtgccactgtactccagcctggcgacagatcaagactccgtcaaaaaaaaaaaatcatataaaataattgaagaaaaaatattttttaatccagaggaaagtcagtaacaaacatggaaaaatacttaaccttgttagtaatctgaaggaaatataccctgaaaaggtactgttttagttattaaattagcagataatatcaagtgttggtgaggaactttacgttgttagttgctgccggggctgggcacagtggctgatgcctgaaatcctagcactttggggggacaaggtaggatgggcgcttgaggccaggagtttgagaccagcctgggcagcatagtgagaccccatcactatagaaagaaaaagaaattagctgggcatggtggcatgtacctgtagtcctagttaatcaggagtctgaagtgggaggatctgttgagcccaggagttcaagattacagtgagctgtgatcatgccactgtactcctgggcaacagagccagcccctgtcatcctccctgcatctgcccaccataattatgtattaatacatacccttcataatcctctctgtgaaatttatcctaaagaaacaattcaaaggaagaaacagtttgctacattaagaatattcattattttattatttatataacatcagaatattggaaaccaccctaaataaccaagcaggtagaaatcgtgaagtcattcgattcatttatgaattatgttcataatcaacacaatcaattctttcaaatgttttatttagaacatttgtatcaatgtttacttacatattttgtacccatttaaaatgataggaagtgggctgggcgtggtggttcacgcctgtaatcccagcactttgggaggccgaggtgggcggatcacctgaggtcgggagttcgagggccgcctgaccaacatggagaaaccctgtctctactaaaaatacaaaattagccaagtgtgatgacgcatgcctgtaatcacagctactcaggaggctgaggcaggagaatcgcttgaacctgagaggcagaggttgcggtgagccaagatcgcgccattgcactccatccagtctgggcaacaagagggaaactctgtctccaaaaaaaaaagataggaagttagttgtgttcttgcgaaaaattgtgtgtgtgtgttttgttttgttttttcgagatggagactcactctgttgcccaggctggagtgtattggcatgatctcggctcactgcagcccccacctcataggttcaagcagttctcctgctcagcgtcccgcgtagctgggactacagatctgcgccaccacacctggctaattttttgtatttttagtagagatggggcttcaccctggtggccaggctggtcttgaactactgacctcaagtgatccgcctgctttggcctcccaaagtgctaggatcacaggtgtgtgagccactgcacctggccaaaaagtgctttttgatatctgtccaaagctatatatttaatttgtgtccctgttatgattgaaacagtaaaaacaacattgaaaagaaactcaaaacttaatgactgtttgagacttactcactaaatatgtattgcattttaagaacctgactaatgcatcttaygaactttcaagaaataaatttttagaaacatttctcttaagttcacttacaaactatttaaaaatacataaaagactccagataaatcaaaagtagtttctcaaggtaaaatattctatctgtttcacaagtatttgttgaattagcttgtttttttttttttttttctgatttagctgggaacggcgggttgacaacatgggacgtatttattatgttgaccatttcacaagaacaacaacgtggcagaggccaacactggaatccgtccggaactatgaacaatggcagctacagcgtagtcagcttcaaggagcaatgcagcagtttaaccagagattcatttatggggtgagcagcctgttgtttaataaactaataagagtattttgtttctagccccttccagcatatgtcatggaaagcactaaaaagaaggtgcaagtagcatggcaacccagttgttgctgttagtaggtattatttttagaccttgtctggggtattctgtgtgtgatctagtttttcctttttgtaatttgcttaagtccaacttcctcttctttttaatgtcaaaaataagcaaaaaataagttaggacaacttaaaattcatgaacaaaagagtagtaaaaataaacccaagcagcttgaaaataattaaaacatttctaaatttactagtgccttgggtctaagagcatctgactctaaagtggttgtgcaaaactgatgataagagtttaaccactttttaccatttggagataaggcttacctaataaattatttggtactctgggagactgaagaaatttgatcctttataggagtatgcttactatattattctggctttaaatctttattatctttgatataaaatcatttcccttctagaaacaaatggtttaaattttacatattttcctgtagagcaatattgcattaatagtgtaagtactccaaaatcttcctttgctatgcagtctttggtgctaggaattttataatctctcaagtcatacagtatcattgatcttttgtctggaggaaaaggaaaataatccattgagaaatttgattctctatgccaaacaagatggatttgttatatagaacctaaacgaagaaaatcaagccttaaggagctcaggagaaaatgccccctccatcaccatctcttcccctccactgccattggtatcatccctgttagaattcatcagagtaaaacagcacctttcgtattcctttcctaactaggcatagttttatcccttttcttcatattcttgtctattccttatacctcatcatcataatagcactcactgctgtagacaaattcacctttatcagcagccttccctttgttccttggttatgactcaggtacttttctttcatataacaattttttcctgccactttctctaaacagttgctaactatatttcccctcccagtggttttaaagctgaaatgaattttgtctcttgtgtactttacccttcttttcatttttttttctatgctgttttacatcttccttcctttctaaattataatcacctgtggtatgcctggccaaatttcttctaggtttgaatacctagcttgcctgccttctttaaaactagtttccacatgggtgttcagtggaaagagcatgggctttggagttagacacatctgggttcgaatcctggttccacagttactttctccatatgactttgagtaagttacttaacctcatcaagacttatttcctttatctgtaaaataaatacagatataaaattgcctcagagtttttctgaggattctttaaaataaagttccaatatatttggcatgtactgaatgcttagaaatgttagttcccatctcttctctccttcatattcacctctgtatatgtaccctttatctcatttttgcattacacaatctttcaaagcattcttttaaaagagagatttagcagatttctggagcaccaacggtgtgttttgactactgtaatcctgaccgatttagtactcagagtctttggaattttttttttttttttaagtacagcttctccttcatcatcctgtccccccgcccaatccaatataatctgaacaattttctgaaatttttactctttgtacttgatgtggagtggtttgaaattacatagaatctaaacagcctattttagttaacatagccaaagatataagctgaagtgaattaatttaacatccttaataacatttactttaaaaatgatggggtgttgctgagaaatagtctgtttattgagtatatgaagtggcctttgtccaccattgttgttgtgactcttactagcatacagaaactgtcatacacccagcattttaagtctcagagtggatatggttgacagtaaaacactgtgaaatggttcttcctggtccatggcttaattgtgcatgtccctagtttatccgtccagggagagccagtggggttggcttcagtcttaaaattgtcagtacagtatgtcacgtgccaaacttttcagacctcatctgtaacttgggctcagaccttttgtagtgtttcccgctggcctccctgttctcacatcttctcataatcatgtctgtcaggaggagcaaggcagttctcgacagcactaaatccaagagttattatatcagtagtgtaatgtagctcatatcctttaaaacctcatcaatcaaccaggtttctgtagtaggccagtgacatggggttgtaggggtgggtaaagaaacaagaagagatagcaggggagctgctctatattgagatttaagagaaacaaccaaatgtaacgtaaggactttgtttgggtcctgattttaacaaataagcaatcatgcatttaattacagattaggtattggatgataaaattaacattgattctttaccacatgtcataatgacattgtgattatgtaagaaaatgtcagcctggcgcggtggctcacacctgtactcccagcactttgggaggccgaggcgggtggatcacgaacaaggtcaggagtttgaggccagcctgaccaacatggtgaaacccggtctctactaaaaatacaaaaagttagctgggcgtggtggcgcgtgcctgtgatcccagctactcaggaggctgaggcaggagaatcacttgaacctgggagscggaggctacagtgagccgagatcgtgccactgtactccagcctgggcgacagagtgagactccatctcaaaaaaaaaaagaaaagaaaatgtccacaaattttagagagacatactaaaatatgtagtagaggtgaaataatgtttgattttcgcttcaacaaagaacaggagaaaagagataaagaaacttggcaaagtcttgataagtgttgaatcctggtgctgggtatgtgggaatgtgggattcattgccctgttttacttgttttttttttcttccccatagtgaaattatttttaatgcagttagactcttgtttatcttactgaagaagaaagggtttaaccaagtcttactgggtgaccatrtaattatctctacttaattatacatttaaatcaaaacagacttaatatctctacacagagtcggtgtgacttttgttttctttttccaaaggttgactcttactttgctttcatcttatctagccaaatctttctctccaccaatgtgatcattggaaacagaacttttaagaagtcttccatacagttctaggctcattaacactttccagctggaaacctttccttccactcatctggcagcccactcttcctgttcccccaactctcttctcataattctttgtatgtcacatgttctgtatttgatcttctgtttttgagttacacatataatatttttcatagtcatatgatgattctgggtactggtattgtaaatgacttttgggggggttatatatttttctaatttttatattattgatgtaaaatttgtagcacaaaggaaaaatggtcattttggggatgaggattacatatatgtgtagtattttaattttaaataattttaaatgttaggtaatgtttgcaccggttttttttaaaccaaaccaaagtatattggcatttatccataaccatgtgacacttctttaagatacaaactctctgtgttatacattgccagggaagggaaatcagaactcataagcttgctgtcagataagttgttaagttgttaatagtttcatcactttttggttctttttagaatcaagatttatttgctacatcacaaagtaaagaatttgatcctcttggtccattgccacctggatggggtaagtcacatgagtttcttcatggagttctgtcatttcatttttgttctyttccaattgtgtcattttaaaacagatatttatgtctgatactgtgctcttgcttgagtgaatgtctgggaagtttttttttaatatatatatcagtttaattcacaaataggcattaaattccccaaacattaagtggactctttataaacttttattgacgctcataattattttactcttctacagtttaaagatactgatcacccagcaataaaaaaggaatgggctattgatacaccagtaggtctgggtggacttcaagagtaatttgcttgatgaagaaagtcagtctcaaaagatcacawcctgtgtgattcaattcatataacattctcaaaatgacaaaactagagatggagaacatattagtacttgtcaggaaacagggtaggtgggaagtggattcaaatattaaaaggtaacataagggggttttacgtgatgatgatgattccatcatcttgattccatcaagatccacaagatgattctgtatcttgattttggtaataggtgattacattaataatgtatacatgagataatgcatagaactatatatttacagaaatgaattcagcttttaaacatggtgaaaatttaacaatgtttgtggttaacaataatgtaccaatgccacttctgtggttttgatgctgtacgtagttatataagatgtcaccatcggagaaaaatgaagtatatgtgagactttttgtgcaattttttacatcctgtgagtaataattaattcaaaataaaaagctttttaaaaaattgyaatcacattggttctcctaaaacaaggttcagagtttggttaagttggcattatctgatagaagagtggaaggagcacatgtgaaggtgtcaacttcatgccctacaccatggagctcaagagcatgtgctgttattgagtatatctgataccttagttattaaaatagaccttaatagactttaagctggacctaccctactaggttctattttatagtgttatgtaatactcacagcattatatagcaaggtttcagaataaagatggcagtatagaaagttttgcatagaagcaagataataatatattataatagaaagtggaaaacaacataaagcccattgtggaaccagagttttgtcttcaagagctgaagatacttcataatattgggataaattcagaaagtgatatttctagattgggaaaagttggtccccaagatacattgttctagcagtactgagttatggagaaaaaatgttggtgtgtcaagatcacatgagtctggttaataaatgctactgggggtataagcttttctttgagaaatctcattgctcttatttaaaggtatctattctcaaaacacttctgtgagtcaaaaaggtaaaaaatgtattaggctatacatataactgttactgttattagcttataacaacaggaggacatatgaaagttgtgggcccgatgcagtgacttacacttataatcctaacactttaggaggctgaggcaggtgaatcgcttcagttcaggagttcaagaccagcctgaccaacatggtgaaaccctgtctctactaaaaatacaaaaaaattaggtgggcttggtggcccgtgcctgtaatcccagctgctcaggaggctgaggcaggagagtcacttgaacccgggaggcggaggttgcagtgagccaagatcgcgccattgcactccagcataggcgacagagcgagactccgtctcaaaaaaaaaaaaaaaaagaaattagccaggcatggtggtgcttgcctatagtcccagctactcttgaggctgacgtgggaggatcgcttgagcttgggagtttgaggcttcagagagtcgagatcacactattgcactccagcccgggtgagagagcaagaccctgtctcaaaaaaaagaagaaagcaagttgtgaatttctgtctttaccaaagcttggcagcctggagttaaggagtcctctgtctctactgaagcctaagagtggtcagtgaatggttagtatgaagtactttagaagaggggatgttgcccttacaaggcatattaaacttaacctgtcagattgcattcccagacatggatggttttatttctagagtttcccagctttatttctagagttgtatgtcttatgttagagaaggagaaaaaaactcatgcactaaaatgatatatccaaaggatatgtatttatcctcttaattttattgcaggccaggcatggtggctcacacctgtcatctcagcgctttgggaggctgaagtgggaacattgcttgagcccgggagttggagatcagcctgggcaacatagcgaaaacctgtctctataaaaaaatacaaaaaataatctgggtgtggtggaacacctcctaatcccagtttcttgggaggctgaggtgggaggatcacctgagcctgggaagtcaaggctgcaagtaggccaagattttgccactgtgcttcagcctgggcaacagagtgagaccctgtctcaaaaaaaaaaaaaaaaaaaaaaagttgcagaaaaactatgacctgcttcatggttatggtcagaaacaaaactgttttactccttctctagggcaggtatagaaaaaaatgcctcttgcttatagaaagctgaattgtgagctgcgtttcctttatcagaaaagtctttcctgcaagttggtccttgccttctgtattcatcattttctttatcatccagatctttctcatttttactttagccaacaacactttgctaaaatactgtgttaaagatccagcttagccaggttattagagtcttgttctgctattttacagtctgcttatttttaggtttcacattcctcatgttgaagtagtgctacagatgtttatgattatcctactcagactgagcactgctttatgacttgctgcctttggggcatataccttacttgtagaaccagtgacagcactggtagtatatcagatgaagcaacccacccaacataccttcaggattgacccaggttgatagaatcccatcttacagcttgcaccctttcagacttttatatgctgggactagacattcctacctcataggctcagtgaataattggttttttagagatgggggtctccctgtgttgcccaggctggggtgcagtggctgttctccagcatagtaattgcacactacagctttgaactcctggcctcaagcaatgcctcagcctcctgagtagctggaattacagttttgtgccacgatgcctagctaggcagtgaagaatttttaacacatgaacatactatagaggataaagaacaaagaatacttttggttcaccagtattatttaatagggctttgtataggtgcttcgccaatcaagtatgaagatattctctcattttcctagttactgtgaaagaatacatagaatgacaagaagtgtctgttttttactgttttattcatcaagtcaggaagtgttctaatctgcatttggatttgatgttcagtaatttcagtattgtttattatgtgatttttcaacaaagtcagaaatccgttctacagccacagcacttcctctcattaagtagatgagccttcagttcacaaatgtgtcaaggctgatctcagcagcatatacttagaatatatatgagaaaaatgtttgctattaattttctcttgcctcatgttatcttctgaaaggaaaatcttggcctgaaatctgaactttgctgacagataaaagatgaatggccattacagtggctcacgcctgtaatcccagtactttgggaggccaaggcttgtgtccaggagttcgataccaggctggggcaacatggtgaaaccccatctttacaaaaaatacaaaaattagttgggtgtggcatgcctgtagttccagctacttgggtggctgaagtgggagggttgcttgagccccggaggtcaaggctatagtgcgctgtgattgtatcactgcactccagcctggacaacagagtgatactctttcaaaaaaccaaaagagagagaaaaaagttgagtatgtgctcagctatatacttagggtattatttttaggttataaaaattatttggatatatatttttaaacaagaaagagaattctggctgggtacggtggctcatgcctgtaattccagcactttgggaggtcgaggcgggtgaatcacctgaggtcaggagttcgtgatcagcctggccaacatggtgaaatgctgtctccacaaaaaatacaaaaattagctgggagtggtggtggacgtctgtagtaccagctatttgggaggctgaggcaggagaattgcttaaacctgagaggtcgaggctgcagtgagctgagatcgcgccactgcactccagtccagcctgggtgacagagcaaggctccgtctcaaaaaagaagaagaagaacaaagagagaattctggattctgcaaataaatttttaaaatttaatgcgactgccaagacatgaacttatcttgctgttatgttaacaagagcaagctgtaacactgtgggtgattatgtttttcttttttttttttttgagacggagtctcgctctgtcgcccaggctggagtgcagtggcgcgatctcggctcactgcaacctccgcctcccgggttcacgccattctcctgcctcagcctcccgagtagctgggactacaggcgcccgctaccacgcccggctaattttttgtatttttagtagagacggggtttcattgtgttagccaggatggtctcgatctcctgacctcgtgatccgcccgcctcggcctcccaaagtgctgggattacaggtgtgagccaccgcgcccggcctatgtttttctttagagacagcctttgagttggtgataagcttatgcactgaagatgccttgaccagcaaaacctgtgtcatgagaggcagagtcccacttttctgtatattatgcacattggaattctattttcattttaagctaagctgacatagaaagtagctttaaatgtcagaagcaggtttgtgatactcactagttacatccattttaacctctgttatcactactacttgaaatcatggaattatattggaaataaaattaaatattaccaaatacgaacttgacaagactataatttggcctaaaactgatccagatgatctcaagtgttaatttgaaaaatagttaccaatttttcttttttcttttcctgtttttttttttttttttttttttttttttgagatggagttttgctcttgtcgcccaggctggagtgcaatggcatgatcttggctcactgcaacctctgcctcccgggttcaagcgattctcctgcctcagtctccctagtagctgggattacagatgcccaccaccatgcccagctaatttttgtatttttagtagagacggggtttcgacctgttggccacgctggtctcaaactcgtgacctcaggccatccgcctgccttataactcccagagtcctgggattacaggcgtgagccacagcgcaggaccaatagttaaccaatttttcaaaccacaggaaataaaaattagccatgtcaacatggattaaacttaaatttttgtttaaaatgctgatttttagaaactaagctttttaaaaagtttcagttcattctatgatctttaatacatcagttcattctatgatctttaatacatcagttattcattttgagacatgttgaacaaataaattaggatacagcaggaatcccatcttttgaagaattcattggtaatgggacagagaagtcagtaattcaaaaacagcagaactgttaaaatttcaagtctacttaatttgtttactaaaagagaaaatgatatccacattttttttttttttttgagacggagtcttgctctgtcgccaggctgtaatccatctcggcacactgtaacctctgcgtcccgggttcaagcagttctcctgcctcagcctctcgagttgctgggactacaggtgcacaccgccatgcctggctaatttttttttttttcttttttgtattttagtagagacggggtttcaccatgttgcccaggttggtcttgaactcctgagctcaggcagtccgcccgcctctgcctcccaacgtgctagaattacaggcatgagctactgcgcccggccaatatccacatcttctaaaccttaatggggagatttcaggaaagcaggtaaaattttgtagactgggaacacgaaaacagggagaatcctaaagcaagaggcagttggggaacaagcagcagctttagatgcagtaattagagaactgagttctgcttcctatcccttgtatagaaagttactgtagatatttaggattttggaactgggtatattaaggaacgagatatgttaagtgtattaagaaaggaagtattttttagttgaataatgcctagcatataccttatattatattccttattttgtatatatatgtatgtatatatacacactctcaaattacattatattccttattttatatatatttttatatattgtgtgtgtgtgtgtgtgtgtgtgtgtatatatatatatatatatatatatatatattttttttttttttttttttttttttttgagacagggcctcactttgtcacccaggctagagtgcagtggcatgatctcagctcactgcagtcttgacctcccaggttcaggtgaccctcctgccttagccccggaagttgcttctctgtcccattaccaattaattcttcaaaagatgggactcttctggtatcctaatttttttatttgttcaacatgtctcaaaatgaataactgatgtattaaagatcacagaatggattcaaactttttaaaaagcttagtttctaaaaatcaagttgtacaagttgtggggctaaggcaggaggatcacctgaacctgggaggtcaaggctgtagtgagctgagatcacgccactgcactccagccagggtgacaaagtgagaccttgtctccaaaaaaaaaaawatatatatatrtrtgtgtgtgtgtgtgtatttatatatacaaatgtatatttaatatatatcaaatatatatattagtgggctgccagcacggcccactaatttttttgtattttttgtagagatgagggttcaccatatggcccaggctggtctcaaactcctgagctcaagcaatctacttgccttggcctcccaaagtgctgggattacaggcctgagccaccccgcctggcaccttactatattttaatgaatgaaatgatgtagtatggaaaaaaaaaaaatccctaaatggagacctgagtttccatctcatctctgctacttaattstgaggtttcaggtagattatttaacctatctgagttttcttatcttaaggataaagatgaattcacctaccctatggractattaagaataaaatgaaggtcctgtgtaaaaaactaaataactgttcattattcttgctgctgttggttggattgagtagaaaggtcctatggttaggacattataaagtacgtctacttagcttctaagatgtaatatttctataacttcagtaaggatgtgcatttaatagtcaataaattaaaccttttaaagctgtgatttaaaaactataaaataaacaatgaaatgagaaatgggcaaattcaaataattttattttaccttgagcaagaagactatgccaatgctaatgctttgctttcccctgcccctgcccttcccaaagagaagagaacagacagcaatggcagagtatatttcgtcaaccacaacacacgaattayacaatgggaagaccccagaagtcaagggtaagaatagttacttgtgtatatttaatctcttaaagattataccttatttctaacaactgaagaagatcaaagttcatattcttttgccaaagacctaaaacgttaatcacctacatactttggaaagagaaaattatactattattttcatctaatggaaagtttgaagatttcttcaaagtgcaggaaaaaactttaactgggcatggtggctcatgcccattatcccagcactttgggaggccaaggagggaggattgtttgaggccaggaagacctgcgtaatgcagtgagaccctgtctctacaaaaaaaatccccaaaattgggtgtgttggcatgtatacctgtagtcccagctactcgggagactgaggtgggaggatcacctgagcccaggaagtcgagactgcagtgaactatgattgtgccagtacactccaacctggaggacaggttgagggctgtttcaaaaaaaaagaaaacaatagaaaagcaaaaaaaattatctggcacatgagaatatacttattaacatatatattatttttaattactaagaacagattagtgattctaaatcagggtttcttaacctgagatcactggttaagaatctagggtatgtggtttcaaggaggaagaaaatacatactcagtttcattactctttactggaaatttagtatcttcttccattatgaatgtaggctactaccatgtaggattaagaatgcctaggagtttgccatcagtagaagtcaaagggtgttaaaaaatattctgttgttgttgcagatatctctaaatacttgtttacacacataattacaaggacttgctaatttattaataaagagatatatgtacattatcacaaaggtctccctttgttgcccaggctgttctcaaactcctgtctttaagcgatcctcctgccttagcctcctgagtagctgggattacagaaataatgttttgacaattatgtatatataatggtttatctttgtaacatgttataatagtatgcatattagtttgctagggcgccttaacaaagtaccacagaggaggttgcttaaaccatagaaatgtatgtctcagggttctggaggctagaagcttgagatcacgatgtcagcagggccatgctcactcagaagatactaggaagagatctgttccaggtctttctcctggcttcttgtagctccttggcttgtggcagcatgaatccagtcttcacatggcactcttcctgtctgtatgtctatctgtacccaaatttcctgtttataaggacgtcagtcctataggattagtggcccacagtacttcagtatgacctcatcttgatacatctgcagtaactctgtttccaaataaggtcacattctgagttattgagggccaggatataaacgtgcatttggagggaggacacagttcaacccataacagtctgtaatactatgcrtttatcagactgccagagggttccattctgcaaggaatttggcagactgtacagtcggagggcacagtcctccacaaaactgctgccctcacttcagacatcagcgacaatattgggggtccacaggatgactccagaccaactgtctacaaatttgggggcccccaccaccactcttaggtatgataagttactagaagtactgagaactcattgaaacctcttatagtcacatttattctagagaaagaatgcaaaataaaatcagcagaaggaataggtgcacagggcagagtctgggaggctctgaacatccagcattgttgtgggacagtacacattgaggtcgagtatcaccaaccagggaagtctctggtatctagggtttttattggggcttgatcacgtactgccctcttggctgaccttttgtctccagtccttactggagatttgagctaatgccctttagtctctagttcctccagaggtcggaactgatgctccatgtcccacagccttgactgtccagtgatcaaagcctccaggcaaacaaagatattcccaatacgcagtgcattccaagggcctaaacatcactaccaagttgctgagggcaaaggccagacctctcttttggtataattataatttgagaacagatattccatggctcaaaagttttaaaaacttttgttctgaaggtatggtttaggttgcactgagctgagatcataccactgcattccagcttgggcgacagagtgtgactctgcctcaaaaaactaaaactaaaaataaataaaaaaagatatgctttcaacttaaaatagttttttctgcctaccaacaaatgaccattttctttttaaatggagttactgcatttacttaaatttattcagtttccataaaggaagaatgaagaatttcatagataacattttcttcctctttagaattttctaagaatagaattgaagaagtcacctttctataatttgctgccatttttttgtttcctcttagatgtttaaagttttatagctaaagttagaattctgctttaacaacacagatgacctagttctatctaatttattttcaagacaacaacttgttactgagcctatcttgcaagtataacaattgagaatcctcttttttacatttttggtagtctrttttatctgacatttgtattcagttaagtgaatacaggtttgttgttgttgttgttgttgtttgagacaaggtctcagtctgtcacccaggctggagtgaagtgacatgatcatggcttgctgcagccttgacctcctgggctcaagcaatcctcctgcctcagcctcccaagtagcttggactataggcatgggccaccacacccagctttttttttttttttttttttgggtagagacggtgtctctatgttgcccaggctggtgggaagttgttgccaaacacacaaactgaaatacttgattaaaagatgtcctggcagtatgtaggaaatacttttggaagacctaaagagaacgatcaatctatagttgtagtaggagtaataacaattacaacttgggctcactgtcactttttacctgtctcatttgttcctcatctagtctcatagacattgttgtctctgttttatggacaaagaacctaaagtttagagagattaagcagcttgtctagggtcacaagagttttcaaggtataaagataggtattaaggaggtggcatggaatacttcataaataacatattaggccttgtgtagtgtctcaacatctgtaatcccagtgctttgagaggccaaaataggaggatcacttccggtcaggagttcaagaccagcctggggaacatagtgagaccagtctctacataaaattttataatttaaccgggtgtggtggtatacaactgtagtcctagctactagggaggctgaggtgggaggattgcttgaacccaggagtttgaggctgcagtgaactatgatcatgccactgcactccaccctgggcagcagagtgagattctttctcttaaaagaatctttttttgagttgccttagtagaaaaacagtagatagataatatgggacaaaaggaaaggcttcatttggaggtgtggcagatcatatcttatttaaggaagtgctgagtggcctacactgtgaaatcatgggattcatgaaagggagttagaggtttgggtgcaaagggaacattgaggccagcgtatagaggctgagtgaatgccatatgaagaactttagatcttaatcattggtaatggtggaacagtgatagtactttacagagataactaatttaaataagatctctgttttaggatgatactctgttagcagtatcagtataagagcaggcctagagtgagatcagataaggaaaacgagttaggtggctgttcaaaaaatgcagaagatggctgggcgcagtggctcacgcctgtaattccagcaccttggaaggctgaggtgggaggatcacaaggtcaggagttcaaacccagcctggccaacatggtgaaaccctgtctctactaaaaatacaaaaattagctgggcgtggkcgtggtggcaggcgcctgtagtcccagctgaggctgaggcaggagaatcgcttgaacctgggaggtggaggttgcagtgagccaagatatcgtgcccctgcactccagcctgggcgacagtgagactccatctataaaaaaaaaaaaaaaaaaaaaagcaggagagaaacaaagccagagaaaggatggtgttggggattggaaatagagatgaacgtgaagatttctaaggcagaatggttagaacttggttaacaaaatgtttaggatgagtcattagctaatggggaacataagccaagtagacggcagaagacttgagttgtgtttgatggactttgagtttaacctgtttgtaggatgtccacatagagatgtmtagtatacaactgaattactgaactgaatggttttctaaaagatttctgctatgtttattgacatttgtagcttctgtacttggcaaacaagcaactctttaatatttttgtttatgttttttcctgtgtttcgtagtcaattaaatgaaaagcccttacctgaaggttgggaaatgagattcacagtggatggaattccatattttgtggaccacaatagaagaactaccacctatatagatccccgcacaggaaaatctgccctgtaagttttctaaacattgtagattaagagtaaaatactagtccttcagattttgatataaagatttgtattagcaaggartggaagtcttagtatttcttgagttagcttgacaataggtttctgttcattaagtattttgcatttccatctccctcttggatattttatcctagagattttcatatttgttaccatttgttcacacagcactaaatgaaactatttagaatttataggtattgtactgcttaccaattagtctctgatttctgattttcagcttctttcattcccttaactttttgacgttaaaaaagctctcattacttatcccccaccccatttctgagaaagtaaccttttgatttgcttatgtgctttatgacttcttttgtgggaaaatatataacctaaagtttcttgttttatgtgtacagttcagtggcattaagcacattcatattgtggcataatcattaccaccatccatctccagaatgttttcatcattccacactgaaacactgtaccctttaaacaataactttagcagacctggtaaccagccttctactgtctttctctatgaatttgactagtcgaagtacctcatattattggagtcatacaatatttatgcttatgtttctggattatttcactaaggtcatatcttcaagatttatccgtgttgtaatatgtatcaacattttcattccttattgaagctgaataatattccagtgtatgtatatatcacattttgtttattcacagatatttgcattgtttctgttttttggggggtattgtaaataatgctgctctgaacattggtatataattttctgcttgaggccgggcgcagtggctcatgcctgtaatcccagcgctttgggaggccaaggcaggcggatcacctgatatcaggagttggagaccagtctggtcaacatggcaaaaccccatctctactaaaaatacaaaaattagctgggcatggtggcgcacacctgtaatcccggctactcgggagtgtgaggcaggagaatcgcttgaacccaggaggcagaggttgcagtgagtcaagatcatgccacagcactccagcctgggtgacagagtgagactccgtctcaaaaaaacaccaaaaaccaagtatctgtttgagttcctacttcgatgacttttgtatctgtacccaaaagttagggttagggttagggttaggatgacttttgtatctattgctggattaaatattaattctgtatttaattttttgaagaaccaccatactgtttttcagtgtctgtgccagtttacatttccaccctagtgcagaagaattccaatttctgtacgttctcatcaactcttctgttttttttttcttcatcatcatcatatttttttttaaatagtcatccttaatgtcgtatttcattgtggtttttctttgtatttttctaatggtttgtgatgttgagtatcttttcatatgcttcttggctatttgtgtatcttctttggaaaaatgtctcttcaagtcctttgcccatttgttgttgttttttttttcttttgcgattgagttttaggtgttctctatatattctgggtgttaatcccttatcaaatacatgatttgcaattattttctcccattctgtggtttcctttttactgtagatagtgccctttgatgtataaaacattttagattttgatgtctgatttgtcaattttttcttttcttttcttttttgagacagtctctctctctgtcacccaggctggagtgcagtggcacaatctcggctcactgcaagctatgcctcccgggttcacgccattctcctgcctcagcctccgaagtagctgggcctacaggcgcccgccaccatgcccagctaatttttttttttttttttgtattttgtttaatagagacggggtttcaccacattagccaggatggtcttgatctcctgacctcgtgatccacccacctcagtctcccaaagtgctgggattacaggcgtgagccaccgtgcccggcctgttttttctttttttttttttctttctttctttcttttttttttttgagacggagcttcactctttttgcccactctttttgcccaggagtgcaatggtgcgatctcggctcaccacaacttctgcctcctgggttcaagctattctcctgcttcagcctcccgagtcgctgggattataggcatgcaccaccacgctgagctaattttgtatttttagtagaagacagggtttctccttgttggtcaggctgatctcgaactcccgacctcaggtgatccgcccgcctcagcctcctgaagtgttgggattacagatgtgaagctccgcgcccagcctgtcagttttttctttgtcacctgtacctttggtgtcatatccaagaaatcatttccaaatccagtgtcataaagctttgccctaagttctttttttttttgtagatagagtctcactctgtcgcccaggctggagtgcagtggcaagatctcagctcactgcaacctctaccgcctgggttgaagcgattcttttgcctcagcctcctgagtagctggggttttagctacgcaccaacacgcctggctaattttcgtatttttagtagagacggggtttcaccatgttggtcaggctggtctcaaactcctgacctcgtgatccacaccccctcagcctcccaaagagtagggattacaggcatgagccaccgcgcctggcctgagagttctttaattttagctcttacatttagatcttttatccattttaagttaaattttgtatatggtgttgggtaagggtccaacttcatctttttgaatgtgaatgtccaattttcccaagcaccatttgttgaaaagactgtcctttccccattgcatgactgtggcaccattgtcaatagcattttaccatatatgcaagggattatttctgggctgtttattctgttggtctgtatgtctgatttgccaataccacgctatagctttgtagcaagttttcaaatcaggaaggtatgtgtcctccaactttgttctttttttcaagctgcttttgactattcagggtcctttgagattccatatgaattttaggatggatttttttatttctgaaaaaaagaagtcatttggattttgataggggattttattgaatgtacagaatcaataaaatccatattgatcaatacagattcaatatctgtatcaatctggggtagtgtggtcatcttaacaatattaagtcttccaatccatgaatgtggatatctttgtgttttctttgatttctttcagcagtgttttgtggttttcagtgtacgagtcttttgccttcttgattaattcctaagtattttttattctttgtgatgctattgtaaatggaattgttatcttaattttctttttatattgtttattcttagtatatagaaatggaactattttgtgttgactttgtatgctgctactttcctgaattcacttactctggcagggtttttcgttgtggaatatttagtgttttcttcgtaaaagatcttagcttctgaaaacagataagttttcttcttcccaatttgggtatcttttatttatttatttatttttcttgcttaattcctctggctagagcttctggatactatgttgactacaagtggtgaaaataggcattcttatattgttcctcatcttaaagaaaaaacttctaaccattgaatgtgatgtttgctgttagatttttatatgtgccttttattatattgaggtagtttccctctattcctagtgtttcctatccctgttgtggagtgttttatcatgaaagtgtattaaattttgtaaaatccttttttggtatcaattgagatgatcatgtgatttttttccccccctcattctgttaatgtggtatattatgttgatttttcataggttgaaccttttttgcattccaggaataaatcctacttagtcaaaaggattaaagtgtgcttttaatatgctgctgagatttttttgctgatttttttttagtatttttccatcagtgttcataaggaatgttgctctgtagttttcttatagtgtggctttcttagagcaaagatggttccctattactttctaattttatacttctacacattaacaacttttatatttaaagcagaaactggaaaatcaggccaatttggtattaatgaaattacagaggtaatttagatatgggaataaattaccgataatattattctatcattcattttagttacaataagtttgggtgcatataatagaaaacactaaaataatagtggtttatgtaagatagaagtgtatttgtccccattatttaaaaatagtccagcaggacttacaccacatcattaccattgctcaaaaaagaagttacaagaaaaatcaggaaatattttattttgaataataattaaaacaccacatatcacaatttgtgggatttaactaaagtagtcttcagcgggaaacttttgttttaaagaagtagatgagaatataggaaagataaaatcagtgatctctgcttttacattcagatgctagaaaaaggcaagttattaaacctaaagtaagtacaagaaaggaaataaataaaagcagaactcagtgaagtggaaaagaaacaatggagcgcccaaagctagaagataaatttttggtaaacattaataatattaacaacccttagtaattaaacctatagagaaaaaaagagggacatcactgtatattttatagacattaaaaggataataaagggtatatttatgccaataactttaacattttagatcaaatggacaaattctttgaaagatatgtcaccaaaatggacacaagaacagatagtaagtctaaatatccctatagctgataaatcaaatgcataattaaataatttttaagggcaggcccagtggctcatgccagtaatctcagcactttgggaggccaaggtgggcagatcacttgagctcaagagttcaagaccagcctaggcaacatggtgaaacccatgtctacaaaaaatacaaaatattagctgggtgtggtggtgcatgcctgtagtcccagttacttaggagggtgagatgggaagattgcttgagcccaggaagctgtggtgaaccgagatcgcgccactgtacttgagcctgggtggcagagtgtgaccctgtctcaaaaaaaaaaaaaaagaaaaaaaagatttctcatgaagaaaattctggcctagatggtgtcactggtaaggttcatcaaacttataagttataaattaatcagtcctattcaaattcattcataaaatacaagtgatggaaatgttttctttttcatttttttttttttttttttttgagacggagtttcactcttgttgcccaggctggagtgcaatagcccaatctcggctcaccgcaacctcggcctccctggttcaagcaattctcctgcctcagcctcctgattagctgggattataggcatgcgccaccatgcctggctaattttgtatttttagtagagatgaggtttcaggccactgcattccaccctgggtgacagagtgacattccatgtcaaaacaaacaaaattggttaaaggagaaaaatcatacgataatttcaggaaaagcttgtgacataatacaatgcaaatttatgagaaactctcagctaccttggaaacttttttttttttttttttgagacggagtctcactttgtcgcccaggctggagtgcagtggcacaatctcagctcactgcaagctctgcctcccgggttcacgccattctcttgccttagcctcctgagtagctgggactacagacgcccgccaccacacctggctaattttttgtatttttagtagagacggggtttcactgtgttagccaggatgttctcaatctcctgacctcatgatccacctgccttggcctcccaaagtgctgggattacaggcgtgagctgctgcgccctgccggaaacatttttattggaaaaaaaaaatgtaacaaaagcttacagccaacatcacaattaatgatgaaataccgtagaacatcaagagtaagacaaggatatctactgtcattacttcattcaacattgtgtcagtattcctacccagtgcagtgagatgagaaaaagaaatacaggccgggcatggtggctcacgcctgtaatcccagcactttgggaggcccaggcaggcagatcacttgaggccaggagtttgagaccagcctggccaacatggctaaaccccgtctctactaaaaatacaaaaattagtcagtcatggtggtgggcacctgtaatcccagctactcaggaggcggaggcaggagaatcgcttgaacctctgggtcagaggttacagtgagcagagattgcgccactgcactccagcctgggagacagagcaagactccatctcaaaaaaaaaaaagaaagaaaagaaaagaaatataagatgtataaattggaaaggaagaagtaaaactgtctcttttcccctcacacaaataacgtttgtatacagaaaatcatgaagaatctagaaaaaattactagaactagtaagtgaatttaacagcgtaacagaatataaagtcaatgtacaaaatcagttgtatttctacactgatatacattgaatttttaagagggagataatgcagtggtattaagtccaaggctagctgagaaaccccatggtgtcatagtgatctaaaattcttctgtcttttctaccatcctagagtatggtctcattcttcaaagtgacctcatggtctgtgacagctgctgaaacttaagctatcagggtcacactccaggctggaatttggaggaagggcaaattataaacacacacacacacacacacacamtcacacactttttagctattttagctgtcttttagaaaatccttcctttttttttttagacggagtctagctttgtcacccttgctggagtgcagtggtgcaatctcagctcactgcagccttgacctctgaggttcaagtgattctcctgcctcagcctcccaagtagatgggattagaggcacctgccaccacacccggctaatttttataatttttagtagagacagagtttcaacatgttggtcaggctggtctcaaactcctgacctsagatgatccacccgcctcagcctcccaaagtgctgggatttataggtgtgaaccactgcacctggccaaaaagatccttcttgaacgtttcatatgccactttcacttagagacttaagtcacatggccatatagagaaatgtagtctttattatatgtagcattctacttagttaaatagcaagggttttacttaaagataaaggagggaattgatgttgggatagacagcattctcagatagaaacccctttacttagccctcttagatttggcagcatagaaaagaaaatcccacaacagtagtttcaacaraatcaaagttttttgtttgttttttctgttacttaaaagtattcttggggaaatatctctcaaaaagcaaagaatggttttgttaggaatatgctatatttttgaatttggttagtaagtgctgagagagggtgggatattttgctttccttcagcattatcttttacaagcagctatatatgtcctgttaacccttgttcttcctcagagacaatggacctcagatagcctatgttcgggacttcaaagcaaaggttcagtatttccggttctggtgtcaggttagtattggaactgtatctctgtactsccttaactttgttgtgttgcttatattacacagtgattgtgaaaatacttaactcacagaaaaacaggtaaaatgggaagcattagaatctctttcatctatttttagagcaaataaatagatttatcaattagatcatttgtgactttggttattcagaaaattaaacctcatgtaatcccagcacttggggaggccgaggtgggcagatcacttgagctcaggagttcaggaccagtctgggcaacatattgaggccttacctctgtaaatatatatatatatatatatttcttttttttaaagaagaaaattaaacttgaaaccatctgaataagcaaacattgtcactttttcctcagtagccattactttcagattgcaggaatcttcaaatgtaagtaaaagcattttctgatataattttaaccagctactttatttttatgtgttattttttctgagacaggatctcactctgtcacccaggctggagtgcagtggtgccatcatggcttactgcagccttgacctcctgggctcaagtgatcctcttgcctcagccttctcgctagctgacactacagatgcacttcaccacacctggctaatttttagtagagacagggtccccttatgttgcccaggctggttttgaactcctggattcaaatkatcctcctgcctcatcttccccaagtgctgggattacaggcataaaccagcatgcccggacaccagccatttttatatctatcgtttgatataactgactttgatagataaatacatgttcatacatacatgaacatgtccatacatagatgttatattcagtgtttttttcagatgtgatcaactatttcttatgtatagatatttactggaattaatgattttttatgggttctaaatcaaatgaatgccctagtcaaagttactgtgatgaatatttttacacttgaaactcttgtaattaactggacccatggaagcaagaagaatctggattaactgttggaaaataagattaagtaaagatttatttgacacattattaagtaagcagtgtgcatatgagatcaatcttgtggttcttctgtttgcatatattaatctgtaattagcatgaatactcacagatgcattggtaaacattattgaatataaatttatattcatagtctacttgtttctgtaaggaaagataaaagtaaataaaactttccccttttgatttttttgataggctattttaatgatgagagttgacttaagtcattcttctatttcagcaactggccatgccacagcacataaagattacagtgacaagaaaaacattgtttgaggattcctttcaacaggtactgtttcattctctcaataatttcccccctggctgctagcttaggacccgcttttggtgctgtcagtttaatctgaatggtttggaacttcttgagttgaagtccttgaatttttcaagtgcgatctcattgccagccaccttagggcttaaggggtgtgtgtgtgtgtgtgtgtgtgtgtgtgtgtgtgtgtgtttcaggtttccatttctaaactggtatgatttgaaataaatgcataggtaagataataggtttgtgtgtgtgtgtgtgtgtgtgtgtgtttcaggtttccatttctaaactggtatgatttgaaataaatgcataggtaagataataggtttttggtagccaaaggtctggaaatacccatatgaacattatcagattgtagaaaggagaggggaagacttgttttaacacttcagtattacttggatttttacaataagcgtatgttactcttaacaggaaaaaaagtggtcattggtgacagtatctaaaaaaagatatatatgagttttcagaagtagtcagcagattttttcacttgtcttcagaacttgagttaatttactcgctgggcacggtggctcatgcctgtaatcccagcactttgggaggctgaggcgggtacatcacctgaggtcaggagtttgagaccagcctggccaagatggtgaaaccttgtctctattaaaaatataaaaattagctgggcctggtggctgatgcctgtaatcctgtaaagctactcaggggagtcacctgaacctgggaggtggaggttgcagtgacccgagatcgtgccattgcattccagcctgggcaataagagcaaaactccatctcaatttaaaaaaaaaaaaaaaaaagaaaaaagaacttgagttagtctactattcgcctttatcttgcagatattactaataacctactgcaactaaatgttaaaatgattgtgttatgtagaagattaaaataactagtgaaaaaatgtcttaaaatgaaaacatctggttagtccttgttttatagccagatgtggaagtgattattttcaagcaccagtggtattgtagcaactacagcttcaagaagtacggaattgaatgcaaagggaaaagaggttgagacagttggtggtagctggctacttgctttcagaatcagtttttttcatttcctaatggaacgtcagttattgacattaaaggaaaaagccagttggcatcctgctatgtaggagcagaaaactttttagtgggaagtggagctttactgaggccatttagagaattatgagtcatccccttgatctgatgtaagtgtcacaggccattccccaccctagtccttgcccatttctaattttatgttcataaccacccttttatcactctgttggacgagtttcttgaagcaacttgcttacctcttaccagtcctggaaagatgcaaaacatgattaaactgttcctttatcttttgactttgaaacctaaagtcttttgcaaaataactgactagatggttctaaaacagtttttaaagctgtcaccctagatttgacatccatcaaataactggttaataaaaatataagagaacaatttgattgcttaaaggtaacaaaactaattgcaaaattagcatcagattttctttggatagttgttggataaaattgctctgggatagtgtttcttctgttaacacagcacaactggttatgggggaaagtacaggagaaaacaattttttttccttcatattagacatttgttaaaaggaatttttttttaacttttatggatttatttatagtaaagataaggatacaaatgtcttccacacatatgtggtaawytgtggtgctcgccactccctccctcctgggactgacacactgcagcccacgctgctcaccctggagccccatccttgcatgagagaatggcgccacctggggctgtgcgacctgtcagcctgctcattcccttctccagctcaggacagagaaacacaattcattcataaggtttccattctgttataggcagagatttagaaatcagcattgtttttcaaagagtacaaagttaaaccattctgcttagaaaagaataaacccatccaatcatttttcctctagttgagtcaaaacagagatcaaacttctttgatagtgttatgtctgtgttcagacttagacttcagaatcaaaattttgaaatatttatgaggttaataactatctttgaagttaagcagtttactgagcaattaaatatttttgtccatacacattcagatttaactactgctataaattgtcgtaatttctccagtttcagtctgaacataatagcttatagtaataagacacaggttctagtacagattttccaattagtggtatggccctaaacaagccaggttagatctctgccttcacctacatcaaacaggaataataatatatttccttaacctatcttctaggtaaacagatgagattatatgaaaacattttgctaaagtcgctaaacaaacataagaaaaaatatgtaaggtttttctatcacattaactattttttaatatctgactgacatttttgtaatataaccaaaataaaaattgcatactttcttttttttttcttttattgatcattcttgggtgtttctcgcagagggggatttggcagggtcataggacaatagtggagggaaggtcagcagataaacaagtgaacaaaggtccctagttctcctaggcagaggaccctgcggccttccgcagtgtttgtgtccctgggtacttgagattagggagtggtgatgactcttaacgagcatgctgtcttcaagcatctgtttaacaaagcacatcttgcaccgcccttaatccatttaaccatgagtggacgcagcacatgtttcagagagcacagggttgggggtaaggtcacagatcaacaggatcccaaggcagaagaattattcttagtacagaacaaaatgaaaagtctcccatgtatacttctttctgcacagacacggcaaccatccgatttctcaatcctttacccacccttcccccctttctattccacaaaaccgccattgtcatcatggcccgttctcaatgagctgttgggtacacctcccagacggggtggtggcctggcagaggggctcctcacttcccagtaggggcggccgggcagaggcaccccgcacctccaggacagggcggctggccgggcggggggctgacccccccacctccctcccggacagggtggctgccgggtggagacgctcctcacttcccagacggggcggctgccgggcggaggggctcctcacttctcagacggggcggttgccaggcagagggtctcctcacttctcagacggggtggctgggcagagatgctcctcacctcccagacggggtcgcggctgggcagaggcgctcctcacatcccagacggggcggcggggcagaggcgctccccacatcccagacsatgggcggccgggcagagacgctcctcacttcctagatgtgatggcggccgggaagaggcgctcctcactcctagatgggatggcggccgggcagagacgctcctcactttccagactgggcagccaggcagaggggctcctcacatcccagacgatgggcggccaggcagagatgctcctcacttcccagacgtggtggcggccgggcagaggctgcaatctcggcactttgggaggccaaggcaggcggctgggaggtggaggttgtagctagccgagatcacgccactgcactccagcctgggcaccattgagcactgagtgaacgagactccgtctgcaatcccggcacctcgggaggccaaggctggcggatcactcgcggttaggagctggagaccggcccggccaacacatcgaaaycccgtctccaccaaaaaaatacgaaaaccagtcaggcgtggcggcgcgtgcctgcaatcgtaggcactgggcaggctgaggcaggagaatcaggcagggaggttgcagtgagccgagatggcagcagtacagtccagcttcggctcggcatcagagggagaccgtggaaagagagggagagcgagaccgtggggagagggagacgggagaggcagaggcaggggcaggggcaggggcaggggcaggggcaggcagaggcaggcagaggcagaggcagagctgcatactttcaagaatgacaaaatttagtagttatacaaggtgaattaaaatagtaaagctagtcataatacagaatccactcatccatgtactcattttatcacttaaataataattataaaaataggtaaaattccatgaaaatattcctatttgttctagttcaggaggtcttgcccacatcaatggattgtctggcatcagccactgtttcaggcactcgaacagtcatattgtccatagattttgtcaaacagatttggcmgcccaactgtgatctgttagtccatatgccagatcgagcatgtgattctcctcatcagtgattgcatctaacttctcatatatgtgatcttcaaagatgagatgacaggttaaacaagccagagttccctcacatgcaccaaarccatcaatatctggattattttcaaccacaacgtctagcagagaatcaccaacttttcctttggttgttaatgtttcaccatcwcagtttataaagtggactgtcactttatcttctgagctgctccgcgcccctgccgacacgctcagcggccggctcgcctccgcgctccggcccggtccccggctcctcagcaggccgctggctccagcgcgggacccggcgtggtgcagccaccggccggccgggtcgccgaggaccgcagaagcggcgcgcagcagccgggcgcccccagcggcagccatcgcccgcggtcgggaactcaaaaggaattatttaaagatagttttaaccttgtgacatttctcatttgcgttgctgtatacctagcctatactatttgtagaatacttggcataaacgtacatatgtcataagcattgaagttttttgttacatctgggattttctggcttgagtgggatgtgaattcataaatgtgatggttttgtgggggaactgagagaacttggcataaacaggtatacttactgatcctctctggatatttaagtgtggtaattcattcttatcactcaataaagtataggcattatatcaacttctccctttccatgttcttctgtatttttttgtaagagtaattgatatatgcagtgctatacacacacaattttggtcaaataatttgttttacgtggcaggaaaccaaatgacctattgattgtagctcagtaatgtactgtccttcaaatatgaagatgatcctattaaccacctatagtgggacacaaaatttgagtagtttttgtaggtagttatcggttgccgctgagaatgagtttccaaagttaactgggtctctctgcagctactggttttcatttctcggttagccagttagctgttacgtgtacctttggctatgagtcaaaaccaaacctaataaccaaaccacaaaaaccccacccaacctctgaccatgcccatctatgttctaagtaattgatacaggcaacattataagtcaatagtagcatcattaaaaataaaatcacggccgggcatgatggctcacgtctgtaatcccagcactttgggaggccaaggccggtggatcacctgaggtcaggagtttgagaccagcctggccaacatggcaaaaccccgtctctactaaaaatacaaaattagccgggcgtggtggcgcacacctgtagttccagctacttgggaggctaaggcaagagaatcgcttgaacctgggaggtggaggtgtggtaagccaagattgtgccattgcactccagcctgggcaacgagggagagactgtctaaaagtaaataaataaataaaatcacgtgtataaggtatataaaaatatagatgtatataataaaatattattaaacgttactataatgtattttctgtatgtgtggttttgactagaccatgaacacctttctgtgtcatgggagatttcagttacctataacgaaggagatgtcaaacctagaagtggtagacagtgtttcaatagcttttttcaccaattattttactttatttttttttagataatgagcttcagtccccaagatctgcgaagacgtttgtgggtgatttttccaggagaagaaggtttagattatggaggtgtagcaaggtagtgataatatgaatactcagaacttagttcctttcctccaaaggtaccattgcacttcgcttgcaagtattattttctcaatcttatattttaggaaaatgaaatatgtcaaattattatacctttattatgctgtagctacagaatttcaaaaaacatttaattcagcactttctatgtcatgtacagctgattgatttcacccacatcactcatttaatcttcagggtaaccttgtgatacagaattttataggatgatgaagaggcttagagactcacctaaggcacataataaattgtagagcctggatgcaagctttgtatcatttaaccagtagccagtgttaagtctaccacctcttatatctgttccacagaaaacacaaggccttatagtgatcaggtcattttccccaccacagattactgatacaggtaatagttactcagtttccaactgagattagtatatttgtcatgaaaatatagaaggttgtacaaaataggagttgaaagtcttaattctgctttcttcatattggagcttaatattggaccctagaagatagtctctaatgagaattgctttgcttattccatgataatatatcacaccaggttaaaaatttgcgtagagctggcattgtgcaaagacaaggactttggggtcaagacgggatttgaatctttttctgctcycaatagtgtgatgttgggcaaatattttcatctgtaaaataagaatattaatatctacatttctaggattattgtgaagagtagaaatattgtttattaatgacctagttcagagcctgtgtctttgtgtgcacgctaattggtggctacattttagtagttcttatttatattatgtttctgagtttaaataaaattatttcaaaatatatgatataatcatagataaataacaaatatgagtagaaacatgtaattttgtataagttaaaggcaattgaagaggagagcaatcattcattcctaataagaaaataaactagcaatattaaagtgtgtcatgagatacacttatcacaagaggccatgaactaacaggaaaagagatccagattacaggcttatgccacatgtattaccccagatcacccatgttacgtagttttagtaaccataatcttatgttaatattggttcatattttcacaatatttgacttagagtctcagcatttttctaatatgtgagtggctggaattaagaactttactgcctctgtgaaattggaagaattttcatattgatttaacgtgtagggagtagtggcacttgatggggattattatgggacttagtaatagatggaatattagattgatttcagccactttactcacatgggtaaatagtgaattttaaatttgcctatgaatagtatttcattgattctaagactaatattttcattttataatatctctgaaattacgatgtatctcaggtaaaattggaaaatacaatttagtcgttcatcaaataaaggtgcaatgttgtcttagattttttgaaatgtaataatgtrtatattaccatctaccaaagatggtgtataytaccaactctgtgaaacagatgtgagtttgaacagaagcaataaaaatcaacatgagattagaaaactatcactagctgaggggtatagatccctgagaactttatagcactgttctttgatttcttggtaacctacaagatttttcatcgtaaattttcttttgatttcagagaatggttctttcttttgtcacatgaagtgttgaacccaatgtattgcctgtttgaatatgcagggaaggataactactgcttgcagataaaccccgcttcttacatcaatccagatcacctgaaatattttcgttttattggcagatttattgccatggtaagtgcaggtcaagaattatgtttactttgcttattcagcaatactaaattttctcttaggtgccataacagatcatatgagagaaagggaagtggttttttgttttgttttgttttttatttttgagacagagtcttgctctgtcacccaggctggagtacagtgacacgatcttggctcactgcaacctctgcttcctggactcagtcagttctcccgcctcagcctcccaagtagctaggattacaggtgtgcgccaccatgcctggctaatttttgtatttttagtagagaaggggttttgctrtgttggccaggctggtcttgaactcctgacctcaggtaatccacctgcctcagccttccaaagtgctgggattacaggtataagtcaccgtgcccagccagggaagtgtttttttgagacaaagtttcacttttgttgcccaggctagagtgcaatggcgtgatctcggcccaccacaacctctgcctcccaggttcgagcaattctcctgcctcagcctcccgagtagctgggattacaaacaagcatgtgccaccatgtccggctaatttttgtgtttttagtagagatggggtttctccatgttggtcagtctggtctcgaactcctgacctcaggtgatccacccacctcggcctcccagattgctgggattacaggcgtgagccaccatgcctgacccagggaagtgtttttaaatgaagagtacatctaatatattgaaataaaatgattattgtacagttattttaagcggtcttgtttccttttttcataggctctgttccatgggaaattcatagacacgggtttttctttaccattctataagcgtatcttgaacaaaccagttggactcaaggatttagaatctattgatccagaattttacaattctctcatctgggttaagtaagtttctttttccatgtaatttwttaaaatatagttatatgcattccgtgtagtattgataacttatccaaactgtaggcacataattggtttattgtatttaaatgatctatatatcaaacctgtctttttattcaatatgataaattttacaraaatacacccaagatcttcggcaataatatgaccttagaacagaatcttatttcttcttattttgatgttatagcttaatattaattatttaagaacatgggcctttcgttaaaaacttataaattatgattgaattggtggatataacaaatagtgctaatttcatttgtgcagggaaaacaatattgaggaatgtgatttggaaatgtacttctccgttgacaaagaaattctaggtgaaattaagagtcatgatctgaaacctaatggtggcaatattcttgtaacagaagaaaataaagaggaatacatcaggtgagagtgctccttttcacatttcactttttgtttgactacagcacattgataattgcttactaatactaatggagagtatctccaaaaatagtatttgtctctgtactaatcaatatcctatgtaggcagtcatttttcatttctaaaaagtttttttttaagtgtttttaaaagagttttaaggataaaagtcatgcaggatcactcttttaaacatcaactctgtaatcactatgctgtataacatgtcattaaaaagaatctcaaatatatatgcagatattttcatggggaatattgtaaggtgtattaatccactttcctgctgctgataaagacatatccaagactgggcaatttataaaaaaaagaggtttaatggacttacagttccacgagggtggggaggcctcaccctcatggtggaaggcaaggaggggcaagtcacatcttacatggatggcagcaggcaaagagagagcttgtacagggaaaactcctgtttttaaaacctcatcatcggccaggcatggtggctcatgcctgtaatcctagcactttggaaggccaaggcaggcagatcacgaggtcaggagattgagaccatcctggccaacatggtgaaaccccatctctactaaaaatacaaaaattagctgggtgtggtggcatgtgcctgtaatcccagctactagggaggctgaggcaggagaatggcttgaacctgggaggcggggattgcagtgagccaggatagcaccactgcactccagcctggtaacagagcaagactctgtctcaaaacaaacaaacgaatgaacaaaacacttcatcatatcttgtgagacatattcactgtcatgcaaacagcaggggaaagacccacccccgtgatcccatgattcagttatctcactgattctctcttacaacacatgggaattatgggagctacaaggtgagatttgggtgaggacacagagccaaaccatatcattctgcccctagcccctcccaaatctcatgtcttcacatttcaaaaccaatcatgccttctcaacagtccccaaagtcttaacttatttcagcattaactcaaaagtccacagtccaaagtctcatctgggacaagggaagtcccttcygcctatgagcctgtaaaattaaaagcaacttagttacttcctacatacactcagggatacaggcattgggtaaatacagccattcaagatgggagaaattggccaaaacaaaggagctacaggccccatgcaagtttgaaatccagcagggcagtcaaatcttcaagttccaaaatgatctcttttgactccatgtctcatatgcaagtcaccctgatgtaagaggtggcctcccatggccttgggcaacactgcccttggggctttgcagggtatagccccccaccggctgctttcatgggctggcgttgagtgtctatggcttttccagtctcatgctgcaagctgttggtggatctaccattctggggtctagaggacggttgccctcttctcacagctccactaggcagtgccccagtagggactctgtatgggcctccaacttcacatttcccctccacactgacctagcagaggttctctgtgagtgccctgcccctgcaagcagacttttgcctgggcatctaggcatttccatacgtcttctgaaatctagagggaggttcccaagcctcaatttttgccttctgtgcaccctcaggctcaacagcacgtggaagctgccaactcctggggcttccaccttctgaagcaacaacccgggctgtaccttggccacttttagtcatgctggagcagctaggaaacagggcaccaagtccctagagtgcacacagcgtggggaccctgggcccggcccatgaaaccatttttagctcctaggcctgcctacaggcttgtgataggaggggcttccatgaagacctctgacgtgccctgtagacattttccacattgtcttggggattaacattcgggtcctcattacttatgcaaatttctgtagccagcttgaatttctcctcagaaaatgagattttcttgtctattgcattgttgggctgcaaattttccaaacttttatgctctgcttcccttacaaaactgaatgcctttaacagcacgcaagtctcctcttgaatgctttgctacgtagaaatttattccaccagataccctaaatcatctctctcaagtacaatcgtctctctcaagtacaaatccaccagtctctagcacaggggcaaaatgctgccagtctctttgctaaaacatacaaagagtcacctttgctgcatttcccaaaaagtttctcatttccatctgagaacacctcagcctggactttattgtccatattgctgtcagcattttggtcaaagccattcaacaagtctataggaagttccaaactttcccacattttcctgtcttcttctgagccctccaaactgttccaacgtctgcctgttacccagttctaaagttgcatccacattttcagttatcttcagcagcaccccactcctggtaacaatttactgttttcacactgctgctaagacatacttgagagtggacaatttacaaaagaaagaggtttaatggacttacagttccacatggctggggaggcctcacaatcatggtggaaggcaaggaggagcaaggcatgtcttacatgaatggcagccggcaaagagagagcttgtgctgggaaactcccattttaaaaccatcagatcttgtgagacttattcactataatgagaacaacatgagaaaggcccgcccccatgattcagttatctcccactggttctctcccataacacataggaattatgggagctacaagatgtgatttgggtggggacacagagccaaactatatcataaggttgggtaaaatttataactaaaatgatgttttatagtatatcctttctgattatttccattggttcatgctactagtctcaagagctaatagttcattcataccttctcaatagcaattctttccagccagggttaaattttgcatatttacttcttaagttccaggttctgcatttcttgcctggtttttccctccataattgaaagtatactatttaacacagtgagctgtcattatttcttggacaacaatctatccttttaaaagtttattttgaaatctgcttttaaaatgtagtcaattcgtttttgtcaattctccagtttttttgttatgatatgtctagattttcttatgacatatatagcattccagagaggtaatgtttcgagattccaagagatgtactacgtttctcaatagttttgttgctggtaagataacattttaagataatgggcagctaaaaaggtttttagtatctacttcaataatggcttgcttaaaatttcagagtttggggggtttttagtattattttaagaagtataatttccttagaataaaatgcactgatcttaagtgtagaagttgaaatttgacaaatatatatatcagcccaaatgtgagcattttatggagagaagttgtgctagatcactcatttaattaccaattctgtaaacactgttccatatagcatcatgtccatgtaaatatgacccaaattgtggaacttttttttctattctggaccccataaggggccaatgcacacctcccttctcccagccccagaggtaggtaaccatttctgtttagttctatttctataactgtttctgatcttaaacttcctaaaatgaaatcatagagtatgtactcttatatctagcttttagtgtctgattttttcttttatttggtgtttgtgagattcagccatattgtttatatcagtattttattcctttttattgctgagaaatattccatgctgtgtatatctcaaaatttgtttatccattctcttggtgataaatgttttggttgtttctcagtctggggcttttatgagtaaagctgctataaacattcttgtgatatctttttgtggacatatttttcttgagtaaatacctaggagtgaaatcgctgggaaggtgtttgactttattagaaactgccagtttcccaaagtgtttttgccattttgcagtcctactagtagtatttgagagttgcttcacgttcttgccaattcagcattgtcagtaatatctcgtggttttaatttccatttcttccttgactaatggtgtcaagtacgtttttctatgcatattgatcatttgtagctcttcttttgtgatgtgtgtatccaaatcttttatccattctaaaattgggttgtctttttatttgtgattgttggagttcttaaatatttcagatcattgattttagaaactcttctctttcccttcttccctccctcttcttaccttttcttacgatacgtctagatttcgttcttctttgacggagtcttgctctgttgccgaggctgaaatacagtggcacgatcagagctcactgcagtcttaaactcctgggatcaaaggatccccctgcctcatccttctgagtagctgggactgtaggcacaagccactgtgcccagcaaattttttggttgtttttatttttgtagagatgtggtcttgctattttgcacaggctggtctcagactccttgccttaagctatcctcccacattctgttttctaatataaggatttaaagctgcatatttccaactaagtatttctttagctatatcccacaattttttgttgttttttttgagatagagtctcactctgaggttgcccaggttggagcgtagtggtagagtcatggttcactgtagcctcaacctcctgagctccagatagcctcccacctcagccttccaggtagctggaaccacaggcatgtactaccatgcctggcttacttatttatttatttattgtaggagatgggtcttactatgttacccaggctggtctccaaactcctggatccaaacgatactcccaccttggtctcccaaagtgctggaattataggcatgagccgccgcatccagtccacacctttttttttttttcccccgagacagagtcttgctctgtcgcccaggctggagtgcagcggtacaatcttggctcactgcaacttccatctcctgggttcaagtgattcttctgcctcagcctcccgagcagctgggattataggcacccgccaccacgcctggctaatttttgtatttttagtagagacggggttttgccatgttggccgggcttgtcttgaactcttgacctcaggtgatccgcctgcctcagcgtcccaaagtgcctggattacaggcatgagccaccacgcccagccacaaattttggaatgttgtgtttttcactattttatttattttatttatttatttatttatttattatgttttatttttattattaatatttttgagacagggtctcactttgtcacccaggctggagtgcagtggtgaaatcttgcctcacggcagcgtccaattccagaagttcaagcgatcctctagcctcagccaccaagcagctgggactacaggcatgtgccaccacacccacatgacgagatggggtttcaccgtgttgcccaggctggtcttgaactcctgtgctcaagggatccacccacctcagcctcccaaagtgctgggattacagatgtcagccaccacatccagccactctcattgtatttaaaagtatttgttaggtttttttttttttttttttgagacgtagtctctctgtcacccaggctggagtgcagtggtgccatcttggctcactctaagctccgctccctgggttcacgtcattctcctgcctcagcctccggagtagctgggactacaggcgcctgccaccacacctggctaatttttttgtatttttagtagagacagggtttcaccgtgttagccaggaaagtctcaatctcctgacctcgtgatcccctcacctcagcctcccgaagtgctgggattacaggcatgagccgccgtgcccagccaggtcttatttttatcctgataatctctactttataattggagtgttcagtacatttatgtttaattttattactgatttggttggacttttgtctaaccattgctatttgttttgctatttgtctcgccttgctatttgtttcttatttttcccaactttctttgttctttcttgccttctttgaataaagcaatttttactttcttttttagctcttctgttggttttttagctatacctctttgtttaactttagtggcaactctaatgattatgataatatgcatctttaacatccctgttgacccaaacactacttcttgtacaatataagaagctcataggccaggtgcggtggctcacacctgtaattccagcactttgggaggctgaggtgggcagattgcctgaggtcaggagttcgagaccagcctggccaacatgatgaaaccccgtctctactaaaaatacaaaaatcaactaggcatggtggcaggcacctgtaatcccagctacttgggaggctgaggcatgagaatcgcttgaacccaggtggcggaggttgcagtaagtcgagatcacgccattgcgcttcagcctaggggacaagagcgagacttcgtctcaaaaaaaaagaaaagaagctcataataatataattccatttacctcactccagctctttgtggtgktgttgtcatatattatttctacgtgtcacaaatataatactttgttactgttattcttgctttaatttttaactattttcaaaaataatcttatatttactcacattactatttctggttctccttatttctttcctcagattcatttttttttttaaatctaagataatttccctttggctttaaaaaaaaaaacctttctttaccatttcacttagtgtgcatctcttggtgatgcattttctcagcttttatatgaaaacatctttatttcaccttcattttttgaaggatattgtcactagatttagaattctaggtttataaaataatgatgcggtcatgtttttatgatttatgttttaaaaaataatcctcatgtcgtagagacaaatactgaagtatttgttcaaaatgaaattatctgggctgggcgtggtggttcgtgcctgtaatcccagcactttgggagaaggcaggcagaacacttaaggtcaggagttcaagaccagcctggccaacrtgatgaaacccccgtctctactaaaaacacaaaaatcagttgggtgtggtggcgcacgcctgtaatgccagctactcgggaggctgatgcacaagaactgactgaacctggaaggtggaggctgcagtgagcccagattgtatcattgcactccagcctgagtgacagagcgcgaccctgtctcaaaaaacaaaaacaaaataaaagaaaaaaaaagaaattatatggcttggcaatggtggcacacgcttgtaatcgtagcactttggatggcggaggcaggaagatcacttgaggccagatatttaaaaccagccttggcatcacagagagacaccatctctacatacaaaaccaaaaatcagccaggcgtggtgttgcacacctatattcccagctactcgggaggccgaggtaggaggattgcttgagcccaggaggtcgagactgcagtgagccaagattgtgccactgtgcttcagctcaggtgacagagtgagacctcatctcaaataaataaagaaatgaaattatatgatatctagggtatgagtaggggcatagatgaaatagatgggcattgtgatgaagcttggacatgtgtacagggggttcattatgttctatttttgaatatattttaagttttttataattttttaaaatttatttttatactcagaatttaaagataagatctaaacttcctgataggttttttcatatttgtttgccagaatggtagctgagtggaggttgtctcgaggtgttgaagaacagacacaagctttctttgaaggctttaatgaaattcttccccagcaatatttgcaatactttgatgcaaaggaattagaggtaatgaattttccttcattcccctgtaccatgctagtaaataatgccttaagttgtctgcttttaactcactttcccatctttcctgttactgtaatatttttatactggggcaaaatgttttgaaacatccccaatggttaaagaaaatcataatttatccaaagataaaacaatagtattaccccctccaaagtacaaatattagagcttctctacaattgagtgacttacttccctgaatatgtatatgtatgacaccgtgcatggaaccttgccttcatgagcaatgtagatataattcttgatgtatagttgataagtcaaagcctactgattgttattctaaagctttgcttaatcttagtctttcctatgtccagctgtttttgtacagttaccttaggaaacaatttgtctttttcatccctaaaggtccttttatgtggaatgcaagagattgatttgaatgactggcaaagacatgccatctaccgtcattatgcaaggaccagcaaacaaatcatgtggttttggcaggtttgtttttaaatttatttctattagttgacacagcataattttttagaatttgcttaccacatatggaaatgagtcacaggtcaaaatgtaccagtgtatatagaccccttagtccatgcattataataaatgaatacagattataacagcatccttttaagactattgccaagtaagccacacataccttgcatctttgtccaaagtagagtgtaagacaattcgagatgataaaatttacctacatttgatttaaatggttttggggttttataggactgtctgtagtatgttttttatcatttatacttcattaattatataatgttcagaaggcaaaatttaagagacttggtttagaatcataayggtatctctctaaaaatgtctgccttaagcatggtatatgatgttcaacatcattagtcattagagaaatgcaaatcaaaaccacagtgaggctgggtgcggtggctcacacctgtaatcccagcactttgggaggctgaggcgggtggatcacgacatcaggagatcaagaccgtcctggctaacacggtgaaattagccgggcatggtggcacatgcctgtaatcccagctacttgggaggctgaggcaggagaatcacttgaacctggaaggcagaggttgcagtaagccaagttcgcactactgcactccagcctgggtgacagagcaagactctgtctcaaaaacaaaaacaacacaatgagataccacatcacacttagtattatttttgaagtggagaagaacaaccattgccaagggcgcattgctggtgatagtgtgaaataccacaccactgtggaaatagtttggtggttcctcaaaatttaagcatagaattaacataagatccaggaattccaatccttggtatacagcccaaaaaattgaaagcagagacttaaacagatacttgtacaccagtattcatcattcatttaccgacacaaaatgtggtatatgcatatacagatgctcctggacttggagttttatcctttatatccatcataagtcaaaaatatcttgagttgaaaatgcatttaatacccttatcataacttacccattgtaaagttacattgtaaagtcacaacttacccattgtaaagttgaaaaatcataaatcgaaccatcataagtctaggtgctcctcaacttatgatggagtaataaacccaataaacccatcataaagtcaaaaatttgtaagccagggactgtctgtgttggaatattattcagtgctaaaaagtaatgagatttttggtatgtgctacaacatgaacaaaccttaaaaacattatgaattttaagataagcgaagtaagccagacacaaacggacaaatactgtataattccacttacatgaggttactagaatgggcagcttcatagaggcaaaagtagaatatgggttaccagaagttgcagggagcaaaaatgggaagttgtgtttaatgtgtacataggttttacttgggatgatgaaaaagttggaaatagtggcgatggttgcacaacagtgtgaatgtacttaatgtcattgaattacactcaaaatggttaaaatcgagaatttatgttgtgtatattttacaaaaatttaaaaaattaaatctggtatacatgtaaaaaaattcatatgagaaacttaaactgagcttctataacaagtaggattacarttgtaggataattaataatactacaataggataaaaattattccttataaaaaagtttttggctgaggcaaaacagttatactacaggctagaaacattctctagaaacctattgttttgagtcagaattgtatgaaataaaaaccacataattctagctatgtgtagctataccaaaacctaaagaacattgagaagaggaggttattgggatatatcctgcatcagaattctgtgagtttgattaaagttgtttattaaaccaaaaagtctgtactgactcaaggtctgtatcctgtgtagccacatgaatatcctataggacgggcaaatctggggctggggggtggtggtgggatggggagtcacaggaagggctgccctagaagagctaatcttaaaactgcgtgagtacggagctcttggtctcagtccatcttactttttatatatccctttaagtatattgtcctaagatttatataaggaaaggttgatggggctttgataaacatggaaatggccctccatccatagtgttaagtaattatctaatgcagtggacaccagagtttcctttaagatttgaaatgagctagatacagtggcttgctcctatagtcccagctactctggaggccgaggcaggaggactgcctgctgcccaggagttagaggctgcartcagctatgattgcatcactgcaccccagcctgggccacagagcctgggacacctcacctctaaaaaaaataaaagatttgaaatcattatttttctttcttgtttagtgtgctgaatgtaacatatgacatatatatctctttaaatatacttttaacagtttgttaaagaaattgataatgagaagagaatgagacttctgcagtttgttactggaacctgccgattgccagtaggaggatttgctgatctcatgggtatgtatacaggatcacttttcctatacagaaaattgtttatcatgctgctttacgtaaatgtgtatacagcctattagaaacaacaaagacagggatagccattttcttaactattcccagttagcatggatttgtataacctttaaaatagtttttagtacttacctttgtagaaatttttaaccctcaagctagaacccacagctaactcattaggacagcagtcttctgtatgtaaatctgttcatttagtcatttgccaaacatgtgtgtcttaagagtcaatcactattggttgtattatttaacgatgtgagaagatcattatataatacaatagtggattgtagttttagtattgtgtttaaaaccactcttccctgggagactgggagttctttgagaaatggattcatatcttcatctttttatttcttgcccctggcaaagtgcctgttacacagcaatctgctgcttaaaatgaatattaagatgaatgactatggcaatattcactttgttactaaacagtaaattatttaagtaaattcaagtatttccttaataccaacattatcccaagtatcataggaggatacacagagaagttaagatcccaaagcctgcttcagactgaagcagagagtcaaaattagaactaagcaggtaattttgaatacagaacatggaaccagtttagaaagtactttaaaagccagaaaaagaatttggatattaccgtgagggtattggaagctgtggaactttttgaagagaggaaaacttgctcaagctgcatttaggaagatttgataggaagatacagtgtggattaaaagatggtgaggacctagagataagaagaaatcattgcagcaatgatgagaacctgatctcaggagatgaaagtagaaatagaaaagagggggtagatactaggtaaagttccaaaggagaaacaggtagagagcttaatagaaaatgaagtataagagaggggtatcagcaataattgtcatgttatggaacatggagcaatggagaagttaggaagtataaagagtatgcatcgttgtagatgttgggggaggatgctgagcagcttagaacctgctgaatttaaggtaactgctggacaaccaagtagaaaaccccagggaagcagctgtagaggtaacaatatatgagttagagttaagaggaaacagaagaagttgaatcatcagagcagtgacatttgatgctgtgagaatgtgtggtcttaggcagaaatagaatacagagaggagtagaaggctaatgcctagaaccatctgcatgtagggataagacagaaggagatagcctaggccaggcacagcctcacgcctataattccagcactttaggaggctgagctgggtggatcgcttgagctcaggagtttgagaacagctgggacgacatggtgagaccccgtctctactaaaaatacaaaaattagccgggcgtgttgacgcamacttgtagccctggctactgggaaggctgaggcagggagaatcgcttgaacccgggaggcagaggttgcagtgagctgagatcgtgccactgcactccagcctgggaaacagagtgagactccatctcaaaggaaaagaaaagatggaattagtctggaagccaatttaaaggagagaccagagagtgaaaagaagaaagaaatagtatactgtctgagaagcaattagaaggaatttttttcttcagtgctacagagaggtctcagaagggtgatttctaggaaagtttttgttaggagacagaaacagtgagattgtggtttggagaattttagaggctatctagtttattttgtttgttttagtttcaaatctttattcttttttactttttaaattattcttaattgacataattgtacacatttaggggtacagtttttattttgatacatgtatacaatatataatgatcaaattggggtaattaggatatccatcacctcaaacatttatcaattctttgtgttgggaacattcaaaactcacttttctaactatttataaacatacagtccaggtgcagtggttcacacctgtaatcccagcactttgggaggctgaggcaggaggaacacacgagcccaggggtttgagacaagcctgggcaatatagggaaaccctgtctctacagaaaatttagaagttagctgagcgtggtggtacatgcctgtagtccctgctattcaggaggttgaggtgggaggatcacttgagccttggaggtgaaggttgcagtgagccaaggtcatgccactgcactacagtctcagtgacagagtgagaccctatcttaaaaatacataaactgggcgcggtggctcacgcctgtaatcccagcacgttgggaggccgaggcaggcggatcacctgaggtcaggagttcgagaccagcctggccatcgtggtaaaaccccttctctacgaaaaatacaaaaaaaaaaaaaaaaattagccaggtgaggtggtgggagcctgtaatcccagctacttgggaggctgaggcaggagaatcacttgaacctgggaggcagaggttgcagtgagtcgagattatgccactacattccagcctgggcgacaagaacaaaactccaactcaaaaataaataaataaataaaatatatatatatatatatatatatatwcacacacacgcacacacacacacggtaaattgttgttgattatagtcattgtatagtgctatagaacactagaacttattcttcctgccgatctgtacttgtgcatctattaaccaacctttggctctcccctcattcctgccacccttctgtagtaaccactgttgcactttgtacttctatgagatcggctttcttagctttcacgagtgacagcatgtagtatttatctttttgtgcttggcttatgtcacttaaaacgtcctccatgttcatctatgttgtcataaatgacagaattttgcttttttaaaaaatgtctgaagtattccagtttgtttatacaccacattttctttatccgtttacctgattatggacacataagttgattccctatcttggcccttgtgaatggtgctgcagtagacatgggagtgcagatgtctgttcgacatactgatttccttttctttagatgaatgccccatagtgggattgctggatcatatggttgttgggcggctgagatgggtggatctcttaaggccaggagtttgagatcagcctggtcaacatagtgaaaccctgtctctactgaaaatactaaaaaaaaaaaaaaaaaaaaaaaaaaattagctgagagtggtggtacacgcctgtaatcccagctgcttgggaggctgaggcacaacaattgcttgaaactgggaggcagaggttgcactctagcctgggtgacagagcaatactctgtctcaagaagttaagaagaagaatttacatccctgccaacagtatataagagttcctctttttccacatccttgccagcatttgttattttttaatctgtaacagttattctaactgaggtgagatgatagttcattgtggttttgatttgcatctccctgatgattagttatgtttaacattgttattttgagagatatctatttagctcatatcccattttttaatgcattgtttttcttcttttttgctgttgagttcttgtatattctggatattctttgttggatgaattgtttgcatatactttctcccattctgcagattgtctctacactgtgttgattgtttcctttgctatgccaaagctttttagtttcatataacccaatttgtctatttttatttttgttgcctgtgctttttatgtcctctttataaaatcttggctcagggccaggtgtggtggctcgtgcctgtaggcccagcactttgggaggccgagacgggtggatcacctgaggtcgggagttcaagaccagcctgaccatggagaaaccctgtctctactaaaaatacaaaaattagctgggcgtggtggcgcgtgcctgtcatcccaactactcaggaggctgaggcaggagaatcacttgaacccaggaggcggaggttgaggtgagccgagatcgtgccattgcactccagcctgggcaagaagagcaacactccatctcaaaaaaaaaaaaaaaaaagaaaagagaaaagaaaaatctttgctcagacctgtgccctgaagcatttttcctgtttaatccattttgagttgatttttgtacgttatgagagaaaggggtctactttcatttttagcatatagatttctgttattccagtaccatttattgaagagagtgtcctttcccccaatgattgttctttttttttgagacagagtctcactccgttgcccaggctggagtacagtggcgagatctcggctccccacaacctccgcctcccaggatcaagcaattctcttgccttagcctcctgagtagctgggattgcaggcacgcaccaccacacctggctagtttttttatttttaatagagatagggtttctctatgttggtcaggctggtcttgaactcctaaccttgtgatctgcctgcctcagcctcccaaagtgctgggattacaggcatgagccactgtgcccagccaatgattgttcttagtgtctttattgaaaatcagttggatgtaaatatgtgggtttgtttctgggttctctcttctgttccactggtctatgtgtctgctattatgccagtaccatgctgtattggttactatagctttgttgtatatcttgaagtccagtagtgtgatgcctccagctttttgttcagaatggctttggctattcaggatcctttgtagttcagtatgagttttaggattgttttttctatttctgtgaagaatgtcattggttgtttttgtttttgtttttgttttttgagatggaatgtatcactctgtcacccaggctggagtgcagtggcacattctcagttcactgcaacctctgcctcccgggttcaagtgattcttgtgcctcagcctcccaagtagctgggattacaggcatatgccaccacacccagccactttctgtatttttagtagagatggcatttcgccatgtgactggtctggtcttgcactcctgaactccggtgatccgcccaccttggcctcccaaagtgatgggattacaggcatgagccactacacccagccgtcattggtatttctgtagggattgcattgaatctgtagaaatttttaatagtacggttattagtggagtattaatttttcaacccatgaacatgggatgtctttacattttttgtgtgttttcttcagtttcttttgtcagtgttttatagtttttgctgtagagatcgttcacctccttggttaaatttatttctaggtttttgttgtttgtagctattgtaagtaggattgctttcttgatttctttttcttctagtttgttgttttatagaaacgctgctgatttttgtatgttgattttgtatcctacaactttacttaatgtgtttatcagttccaataattttttattggtggagtttttaaggttttctgtatataaggtcatgttgtctgcgaacaggkatagttcaacttcttcctaattctgatgccctttatttctttctcttatctaattgctttggctgggacttccagcagtttgttgaataaatgtggtgaaagtgggcacccttgtcttgttccatatcttggaggaaaagcttttagttttctctgttcagtatgatgttggctgtggatttgtaatatatagcctttattatgttcaggtacattccttctgtgcctaacttgttgagagtttttcttatgaagtgatgttggattttattaaatattttttctgcatctattgagaagatcatatggtttagcccatcattctgttgatatactttgttatgttcattgatttgtatatgttgaaccatccttgcaacctttggatctttttaatgtgttgctgaatttgatttgcttgtatttcattgaggatttttgcatctgtgttcatcaaggatattggcctatagttttcttttcttttcttttcctcctttttttttgtttttgtttcttgtatccttgtctggttttggtatcagggtaacgctggccttgtagaatgagtttcaaaaaattctctcttctattttctggaagagcttgaaaagaattggtattagttcttctttaaatgtttgttagaattccattggttcctagacttttgttttctttgatgggagactttttttttttttcttgagacagagtcttgctctttcacccaggctggaacgcagtggcacgatctcggctcactgcaacctccgcctcacaggttcacaccattctcctgcctcagcctcccgagtaactgggactacaggcgcctgccaccatgctcggctaattttttgtctttttagtagagacggggtttcaccgtgttagccaggatggtctcgatgtcctgaccttgtgatccgcccgcctcggcctcccaaagtgctgggattacaggcgtgagccactgtgcccagcttttttttttttttttttttttttttttttttttgtgagacagtcttgctctgacacccaggctggagtgcaaatgggagactttttatttcagattcagtcatgttacttataattgatcttttcagcttttctgctttttcttggttcagtcttggtaggttgtatgtgtccaggaatgtatcaatttccataggttttctaagttggtgtgtagttcataataatttctaaaggtcctttgtatttctgtggtgtcagttgtaatgtctcccttttcgtttctgatttcatttatttgggtcttttcttggttagtttagctaatggtttgtcaattttgtttatcctttcagaaaaaaaaacaacttttcatttcatctatcttttgtcttcatttttagcctcatttttgtttatttctgttttgatctttattatttctttccttctagtaattttgggtttgctttgttcttttctggtttctcaaagtgtatcattaggtcatttgtttaaaatctttccacttttttgatgtaggcatttattgctataacattaccttttaatattggttttgctatattttataattttcaatatattgtgtttccatttgcatttgtttcatggaatttttaaatttccttttacatttccccattggtcattctggagcacgtttaattaccatgtatttatacaattttgaaagttcctctttttattgatttctagtcttactccattgtgttcagaaaatatatttgacattatgacttcagttcttttaaatttgttgagacttgttttgggtcttaatatgtggtttccccaggagaatgttccatgtgctgatgacaagaatgtgtattctgaagctgttggatgaaatgttctatgaatgactgttaggttcatttggtctgaagtacagtttaaatccaatgtttctttgttgattttctgtctagatgatctatccagtgctaagagtggatattgaagtccccaactagtattggagtctgtctttcccttttaatataataatatttcctttttatatctgggttctttggtgttgggtgcatatataactctcatatcctcttgttgaattggtccctttatcattatagaatgccctttgtctctttttatagtttttgatttaaagtctgtttgcctgatatatgtatagctactcctgctcactttggatttccatttccatgaaatatctttttcatcccttccttttcagtctgtatgtgtctttacgggtaaagcaagtttcttggaggcagcatatgatagttgggtcatttttctttttaaatctattcagccagtctatatctttttagtagggaatttatccacttatattcaaggttattactgatagatcaggacttactcctgtcatttttaaaattactttctggttgctttatatatccgtcgttcctttctttctctcattgtttatcattatggtttttgtggttttctatagtgctaaggtttggttcttttttcccttagtgtatctgctctaccagagtgttatattaatactttttrtgtattttcatgagagtgattatcatcttttcacttccagatgtgggagtccgttgagcatttttcataaggtgatgaattccttctatttccccatgtctgggaaatactgtatttctcctgtatgtctgaaggatggttttgctgggtatagtaatcttggctgccaatttttttcttgcagtactttgaatattatctcattctctcctggtctgtaaggtttctgcagaggcagccatctagtttaaacttccacccagcacaggaagagaaagttttagaggtggtgtatgtaattctttaatgggatgcttcttgaccttggggatggatccaacatcccacttttattaatatatattcataatatcccctttaatacactgatttatggatgaaataacctattgacaatccctagaaaatacttatacatagccttaactgtaatataagggattaaattttttaggtaatttataatgaaataatatgtgttttaatacatgtctatttggggacaactatgttagaagatatacctaagaagtcaaatatttgttcctacttataagaaaaggtttaagacaagatcaaaagccattctctataagaagtactggaagggctgagtgcggtggctcacgcctgtaatcccagcactttgggaggctgaggcgggcggatcacctgaggttgggagttcgagaccagcctgaccaacatggagaaaccgtatctctactgaaaatacaaaattagccaggcgtggtggcacatgcctgtaatcccagctactcaggaggctgaggcaggagaatcgcttgaacctgggaggcagaggttgcagtgagccaagatcgtaccattgcactccagcctgggcaacaagagcgaaactccatctctcaaaaaaaaaaaaaaaaaagacaagtagtactggaaaataaaagaacagatgagaaagataaataatagacttaagtatatgtgataacaaaaggagggaagtaacctaaataaagtatgaataatacacctgcaaaaataaattatagatggtcaaggtggagaaaaatgaggtagatcttaaaagcatagtatcagaatatatctcctgtcatgaaattctactataggccaaggctctaacatgtaaaaaagcctcggagaccataacatttgaaaggtggctgaaaataggaacataggtacaaaagtctacacagaagttgtatggtttagggacagtgtcagagtttttaatatttgattttaaatctattaaaagcaattcagaatcctttctgttacatactaatgtgcattattaaatgaaactcctttccatctatgtagttaaatatgctgctaggtatggtgggcacacatctgtagtcccagttatttggaggctgaggcaggagaattgctggagcccaagatttcaagcctgtagtgcactataactgcttctgtgaacagccactgcactcaagcatgggcaacatagtgataccctgtgtcttaaaaaaaaaaaaaatttataaaaaatgaaatgtgaccaggtacagtgactcacacctgtaatcccagcactttgggaggccgagacggttgggtcacttgaggtcaggagttcaagaccagcctggccaacatagtgaaaccccatctctactaaaaatacaaaattagccgggtgtggtagtgggcacctgtaatcccagctactcgggaggctgaggcaggagaatcacttgaacctgggaggcggaggttgtggtgagccaagattgctccactgcactccagcctgggagactccgcctcaaaaaaaaaaagaaaatgctataaaatattgagtagagggtggacatgatggctcatgcctgtaatcccaacactttgggaggccaaggtgggttgatcacttgaggccaggagttcaagaccagcctggccaacatggtaaaaccccatctttactaaaaatacaaaaattagttgggtgtggtggtgcacatctgtaatcacagctactctgaggcatgagaattgcttgaacccaggaggcggaggttgcattgagccaagattgtgccactgccatccagccagggtgacagagtgagactctgtctcaaaaaatatatatattgagtagagagaacatgcagagtgagttaattttaatttatgtgttgaacaccacagaataattttaactgtgtttttttataacgtttcctatattactggactttttacataactacttgtgaaaacaattcagtgttattaaatacaaaagcactaacaatttatattgggtatacttagtatacagggtttagtcaggtgggacatgagaaagttctttgtgtctgacagtgtcacacattacagaacagttagcgttcctgcccccttctaattaaaatatctagtagcattaccagtcattgagaccaacaataaatgcttcctagggaaaagtaatgatcttttaaaaaactggtgtttttatgatcacttttcacagctatctccagcagcaggtaaatgaggggcaagtattttatgtttatacttgtatctgtttttgtaagggtatgccctacaggacctgtaagttccagcattaataatatggaattcactaggatatttacatttcacaaagttttattaattctgtatttaaatcaagttttattgtagtttcgttattgtctttcaaactactaaaattaagctttttgtgtgttcttgtgtaagcttttattaatcataacaatgtgttattccggctaaagaatgctagatgaaactgcattttctcctttgggacttatattaacaaactatagtcttcaaacttttacacttaccagaatcacccggaagcttgttaaagcacatattgctgagcctgacccctagagtttcttttttgtttgttggttgcttttgggttttttgggttttttttttttgtttgtttktttttttttgktttttttttttttttgagatagggtctcgttctgtcacccgggcgagagtgtagtggcgcaatcttgagtcactgcaactttgctgcacagattcaagcaattctcctgcctcagtctcctgagtagctgggattacaggcatacgccaccacacttggctagtttttgtatttttagtagagatcaagattcaccatattggccaggctgatcttgaactcctgacctcaagtgagctgcccacctttgcctctcaaagtactgggataacagacatgagccaccacacctaacccagagtttctgaattagtaagatgatgtgtggggcctgaggatttatggttctaacaagttccctcatgatgctgatgcttgttggattggggaacacagtttgagatccactatactaacaaactgtttatgatttcattatgttttagggagcaatggaccacagaaattctgcattgaaaaagttgggaaagaaaattggctacccagaagtcatacctggtaagtacaatcagaatggatagagaaaacagcttttgtccagttatctgtagctatttaaagccagctagaaattaaaaatgatatttagtagatttacagaatagcacagccatcatagcaatccagtttaagagcattttgttcacccctgtatgattccttacaactatttgcaatcaattccttttttcacatctgaattttttttctaatgtgggatttagagttattttaacttttctctgagggcagcaaaagaaagttaggagacctactttctaacatcatgaccacaaatattctcatttgaaatctaattacatttctaaaaatgtagaaaactaaatctaatcctaatctgacagcaaatatattaatattttggaattcaacctaatgtcaacaatatttgaaccttattttgtgggatatattttagtggtcacatatggtccttcctggatatctgacctctttactgttttactaatgtctattcctttttgtttttatacataatgttttgtacatgcatgtagtgtttaagtaacaattttattgatatataatttacagattataaaactcaccttcttaaattatgcagttcggttcagtggggtttttttgtttgtttgtttgtttgtttgtttttgagacagggtctcactttgtagaccaggctggagtgcagtggtttgatctcagctcactgcaacctccgcctcccaggttcaagcaattctcttgcctcagcctcccaagcagctgggattacaggcgcccgtgaccacgcccagctaatttttgtatttttagtacagatggggtttcgccatgttggtcaggccggtctcaaactcctgatctcaggtgatccacccacctcggcctcccaaagtgttgggattacaggtgtgagctgccgcatctggcctgttcagtgattttagcatatttatgaggttatgtaagcatcattactgtctaattccagaattttttcaccctcccaaaaatccatgtacccattagcagtcactccctttttaccccgtgtagcccttggtaaccactaatctactttctgtctctatgaattttcctgttctggacatttcatataaaatgaatcatacgataaatatataactttttttttttttggagacagtctctctctgtcacccaggctggagtgcagtggcgtgatctcagctcattgcaacctctgcctcctgggttcaagtgattctcctgcctcagcctcccgagtagctgggactataggcagcatgcaccaccacgcatggctaatttttgtatttttagtagagacggggtttcaccatgttcgccaggctgttcttgaactcctgacctcgtgatccacccactttggcctcccaaagtcctgggattacaggcgtgagccactgcccccagccaaaatatacaaccttttgtgtgtagcttcttttacttagcatgttttcaaggttcatccatggtctagcatatacagtatttcattcctttttaaaattaattgttgggtttaatatacataacatagaatttaccatttttaagtgtgtacagttcagtggcattaagtgcattcatatcattatgcagtcatcaccatcacctatctccaaaaattgtttcttttgttgagacatgtctcagtctgtcacccaggctggagtgctgtagctcaatctccactcatgcaccctccacctcccgggctcaaactgtcctcctaccttagcctcccaagtagctgggacgacaggcatgtgctaccacacctggccaatttctaaactttttgtagagacagagtcttactttgttgctcaggctggtctcgacctcttgagctcaagcaatactcctgctttgacctcccaaagtgctggaattacaggccatcatgccagacctaaaacatttttcatcttgtaaaattgaaatggtacccattaaagcaggggtccccaactcctggtccccagcctgttaggaactgggctgcacagcaggaggtaagtggagggtgaatgagcattacctgctgagctccaccacttgtcagatcagcagaggcattagattctcataggagcaataactattgtgaactgtgcatgtgagggatctagattgtgcattccttacgagaatctaacctgaggtggaacagtttcatcctgaaaccatccccctctccactcctgtccatggaaaaattgtcttccacaaaaccattgcctggtgccaaaaaggctggagactgctgctttaaacaatgactccccatgactccctttccccaggtcctggcaaacatcattctactactgtttctatgattctttagtacttcgtaagtgtagaatcgtaccttatttgtcctttcctggctggcttatttcacttagaataatatctttaattttcatccatgttgtagcatgtgtcagcatttcctcctttttaatgctgaataatatttgatagtctggatatactacattttgtttatacattcatctgtccatggacacttagattatttccaccttttggctgtttatgctgctataaacataggtatactgtggtagaatatagatatatctgtccatggccctgctttcagttgttttgggtatatacccagaggtggaattccttgatcatgtagtaattctatttttaattttttgggggaatctcgccatactgttttccatagtgactacactgcgttatattcctacctgtagtgcagaggggctccaatttctccacatcctcacatccttttcaactcttgttttcttctgttttttttttttttttttttttttttggttgttgttgttgttgttttggtgttttaaataatagccatcccaacaggtgtgaagtggtatctcattgtggtttttatttgcatggtaaaggatgttgagcatttttttaatgtgcttattggtcatttgtatgtctttggagaaatctctatcctttgttcatttttaaatattgttgagttttaagttttttatatattttggataccagtcctttatcagatatatgatttacaaatattttttcccatttttgggttatttcactttcttgatggtatcctttgaagcacagtagtatatttttgtgcttctatagtagtgtataaagtagtatactacactactcatttgattctttgcatatttccttttctcaaactaacaattcttgcttttagttttaatcgcctggacctgccaccatacaagagctatgagcaactgaaggaaaagctgttgtttgccatagaagaaacagaaggatttggwcaagagtaacttctgagaacttgcaccatgaatgggcaagaacttatttgcaatgtttgtccttctctgcctgttgcacatcttgtaaaattggacaatggctctttagagagttatctgagtgtaagtaaattaatgttctcatttagatttatctcccagtgatttctactcagcgtttccagaaatcaggtctgcaaatgactagtcagaaccttgcttaacatgagattttaacacaacaatgaaatttgccttgtcttattccactagtttattcctttaacaacaatattttatrtgtgtcaaaagtctcacttgggagtagtgtttttttcttttagacattctgcagacatgcagggaagtcctttggtaactgcaatatacaagattttcctattaagcctcttggtaagaggcatttgttaaaagtgcaagcttactcctgcttctggggatgtgagcaaaattcgggcttgtgttctccctctcattttagtctgacttgactattgtttttcctttctggcgcatgaatccatacatcattcctggaagtgaggcaagactcttgcatctctacaaagtagttttgtcaatttgaattcagggaaaagttggtcacagcctgcaaatgacttcatttggaagtctgattgtttcagttgcctgacaaatactacactttacaaacaatgttaacactgtgattccttcattgttttaagaagttaacctagggccgggcatggtggctcatacctgtaatcctagcactctgggaggccgaggcaggaggatccctttagcccaggagttaaagaccagcctgggcaacatagggagaccctgtcttttttttgggcagcgtggtgggggataaataaataaaaggaaaaaaaacttagcctagaattagaattaatttaattgaattcatctaaagatgtctctggtgatttttatatgttccgctatataattgatgctttatagttttatcataatccaacaacttcagttatatttaattattgttaaggagtttaagactagaaagactagagtgctttctagtccaaatagaggtcagtgaaacagcttttgacatcagattttcatttgagagggagagctgtggtactggctaaaaagaaaggaagataacatccagtaaccacaggaatatattctctgtgaattaaaagtcttcaaagttatcatttctctgacatatgttggagtagtcatttccattctttacattgtcatgaactggattgataaccctcatctgcaatattttcacccctaaaatttttaacagggtttcctttttttctcacgactatttaagtttagattgctccattattaactgattaatgcactttgaagttctctggaattaattattttaacttggcctagcttcgactgtcaaggtggctgttataaatttgacttcattggcagtggatgaagcctaagccagctgagtctctatcatagctgaaccctgaggacagcctcatagctcatgtatcagggacttttgccacatttcagaggcatagcatgaacaagtaatattaagccaagaataagcagcagaaccctgttccatatggaaaaaagaaaaacaattttttgtccctaatgttcttccttttacatcctggaacaacaataaaaacatttttttaaacttgtctactgtaagatactgccatcataaagcagagacttacatgagtgaaagggttgcctcatcaagcagctcagtgtaaatggggaggctaggctctccccagccctatggtttttttatttcatgtaccccaggaaatactgtgtggtttctaaaagccctggttgttaaaagtagggactctgcctttttgttggtagggagaaaaaacgctattgctttgtcttacagagcgaatgtctgccaactacccgttcattatataagtctgaacttggtaatatatggctaatgaagattaagccctctataaagacttcctgttgaggtgaattctcatactgaaatgtagttacctacaatatttactagagatttatgaaattaaattaagagataatgtaagaaaatacattttttttggttctatataatgcttcatgattcatttagggacctagaaatattgtgtgaaaatatataaatatcacccaaaaggctttctgccctatatttttaaaatacagaatagttatatttgaagtagccctggccctagttctatagggcttggctatttaatatttttatggaagaagtgtttagttctggaaaaggtaaatgcttgtatatatttttgcagcctgggatctccctactccattttttcctttaatttaagtggccacatgtatatgtcttccctgctgtgttaggaaaatgggggctggatatcccaagaatcagaggttatataaaaatactgcaaatagaccgcagacataaatatctaccaaatgctatcttaaattttggtccaaactgaacatatggaaatagatttattgtaagtatttrcttagagctttttcttaaatctgaactaacttgcttttagaagtctttttctttgtaagcattgtaaatgctaataaatcctgttaawttttttttttttttttttttttttttactgcatgttacattgaaataaaaacaaagtaaaatgagcaattgccttattgttctgctcttttgcagggggtgggggttggggaagacagcattccacagcctggtcaggagggaaggacctcacttgtttcatcaaatggagtggtttaaaactgatcaagcagctcataataatgaattcctgctctgtcttttattatcttatgtcagagtgcagcaaaatctcatttcataagacttacaataactctatttaaaattcaggtattgtactcgggaggctgaggtgggaggatcccaggagttcaaatcctgcctgggcaacatagcaagaccctgtctcttaaaaaaacaaaaagacatattcaggtactgatttttcatcaagagattgacataccaatgatcagaaattttagtgaaacttgactcaactatacacaaagttctcatcctaaatgaactatttcagtcaagcccactctaccactttttacttatctggttaataatccgaaatgttaccggggttgactcacggaattaaatttttcctctatttttatatcctttcctgttgtggatgtaacttacctttctaaactcctttagagttaacgacttctatttagtattgttggtatctccagcccccctcctttttttgtttttcttttagttatttactttgtttgtataatttgctttcattaactaaaaatggaattggcagcactggattgtatattactgtattaagagtacctttgttttcttgatctgttacttttaatactcaggtaatgctacaaatattacagggagtcaaatgcttttataaagttccttcagtggttgcctcacttgcgttttcctacaagatgtaagactgtttataattaaacttttttggtccttcatttgcatgcttttctatcagtcttgggtaaggaggggtctctttcctctctccccggccccaccttctgagacttatatgtgaccaggtcacatagatttctgcctctctgcttttttaagtggcaagttacagcccatctggattgtggtattgttcccagaccaaatcaagggttggactgcttattctcgcagcccaataatgaggtgcagatgaactgagaaaggagggagtttatttctgtaaccaggtatggggagaaagcctggaaatgatcccaagaccaactcaaaactacaaagttttccagagcttatttacattataagctatatgtctacatgtgagtgtacattcatctaaagacataagtgattcacttttttaaatctataaataagatctgagccctgaagaccttcctctggagcctcagtaaatttacttaatctaaatgggtccaggtgctggggtgattacccttatcttgtttcctgctaaatcatggaggtttggggacttccttcagacccccagtaaacttgtttgtggaggccttcagaccccctcaataagttccttcagacccccaataaaacttgtttaatcctaaatgggttcctttgttatcttgtcatgcttcaaggcccagaaaaggcctgggcaaaacccttggtggccttttgttacattctagcctttgcataagggccctcactctttcagcttttaatatttaacttaaccactcagtgctgaaacagttgttatggaggcctgcgttattgagatctggcctgccacggtacgggtagaaaaaaactagaaagagctgttgcagatgagactggatttggtgcccatgttgaagatgaagatatctgcaggggccatcaaccaacataaaggcctccatatgaattgcttttctgagacaactaaaagaccgggaccacaggcatgagtgctgagtagagaaccaccaactagctagctgtcaagactgttaccaagactgttctcaacaagctgacctggttaccagcgtcagtagaactttgtcttattaggaagctcaggtgattatgctctcatttaaaacagaaccagtggagagagactaagggaagaggaattttttaatacggctgatctaacatggactagaggacaaaaactgcaggcccctcccaggtcctgagtagttagtagaccctatcctgtttattctgtccaatggaagctgctagaatgctctagtttcattgtggcttagaataaggggaaaaatatgccccgctaagtgagggtcaatggtcagtaagtaattgttcttactggccattggctctcatcccaaaccctacaaatcatcaaactgggactcagctgtgactgactggctgttctctggactttttaagtgtctgtctcacattatgtaactccagtacaggagctgctctctctcccagcccatttcagttgtcaattcttccatgttcataggactcctttgtgatcaggatatctggagtgaggagccaggggaatattcctggttggcaaggaaaagagggccttaaacataaatcccagaaggacactgttgatcacttatgcacaggggtctgttaataagcaaagagtggctatggacaagaggatttcctcaaagcaccccacagggaaggaccttgacaatttgtagtcatacttgaaagatcactaaaaacagccctcctgttatttttcttctaattcagacctgttgttctatttgtcttccatatcatagcaaccagtaccacacccatattcatttaataccaaaacaactgtcaacatttatcactatgtgcaggacactggtagatatgctatgtgcagtgtcacttagtgttcctgttattggtaatgattatctctgttttacaagaaaatagaggctcaaaatgattgaatcatgtccacaactattaagtagaaagaatacaggctggaatccaggatggtttgactctaaagcatgcatactttaccatttttgttgtactgctacttaccacaacactgggagtcgaatgtgaccaattttgccattccatttaattagtctccaaatcctatctatccccaaaactttttttttttgagatggagtcacgctctgtcgcccaggctggagtgcagtggcgcaatctcggctcgctgcaacctccacctcccgggttcaagtaattctgcctcagcctccctagtagctgggattacaggtgcccatcaccaatgcacggctaatttttgtatttttagtagagacggggtttccccacgttggccaggctggtctcgaactcctgacctcaggtgatccgcccgccttggcctcccaagtgtttggattacaggcatgagccaccgcgcctggccccaaaacttttaaaaatccgttctctcagagctgacaacattgccacagcccacgtgcttcctccctaatctggctgaccataacagcatcctgtcttcatttttccatcctcctcgctccagtatatcttctgtactacctcaggattatctgtggaagacctgtctcatgcctcctctacctaaaattttacagtggtttctccattaccgcagaataaaacttttttttcttttttttgagacggagtcttgttctgtcgcccaggctggagtgcagtggggcgatcttggctcactgcaaccgccgcctcctgggttcacgcgattctcctgcctcagcctcccgaatagctggggttacaggcgcacaccaccacccccggctaattttttgtgtatttttagtagaggggctttcactatgttggccagactggtctcgaactcctgacctcgtgatccgcccaccttggcctcccaaagtgctgagattacaggtgtgagccactgcgccgggccaaaactctaagcctgccactccgggacattcttggtcctattccagctcctccttcattctcattttggctcctgtcacatgaactattggccattctcttttttgcttctgggattgtaatctgttaaaatcctttcactcctctcagtctggttctccatgggcaagacagtggtgattcttccagtgcttatcttccaggatgttttagggtccagtctctgcagcacttcttccccttgctaaatgctttcctaatgtttccagcattcaatagaaattcctttggatccagtccttttaaaaatttattttgaaataattttacatttacagagctgttgcaaaaatggttaagagttcctgcacagtcttcacccagctttctccaatgttatgatcccatataaccatgctagaattaccaaaactaataaattaacactggtaaaaataacactaaactacagcccttactcagatttcaccaattttcccacccatgttatttttctttctccttactcctctaatctgtgacagttccgcattcattccttgctttcatgactttgagattttggggggcgggggcggggtacaggtatcttgtagaacatccctcacactggatttagtgaaattttctcatggtttaaggctgggagtttttgtggaaaatgactcggaggtgatgtgcccttaacgcatttttatcggggcacacggcatcaatatctccccttgccagtaatactaactttgatctggttacggtggtgtctgctaggtttcttcgcagtaaagtcaatcctcttaacatgcagacactcctggaaggagaaccaaatccttcctcactgaagagcagctactgtggaatgaaactttggagttagatcatcgttgaatccagcaagctacagtgcctgggagaaacagcatttataaagtatcgaggttaccgatacttccctgaagctaccggagataacgttatgtgcgtgttcagcacagtaatgtggcacagggttcactaaacggcagcatgttttaacagaagttatttactcctagaggacccagaaacgtttgcggcctgccggaacaggacaacatagggctctgggaagagtccccctttcagaggtgagaacaagacagaacacacagatgtgaagtgccttctgctaggtaacgcgaggcggggctgagctcggattctaaagactcccaggccagccctaaccaattcatctccgagcttgcacggcatcttacccggagactccagaggtacctgactccagccccaccccaggcctgcccgatcccgaagcgcattttggccctgggcctctctctgcctcagtctgggcgcaaagcgggtctcagcaaccgtcccacttgccttcataccctcccaccacgctccactcagggactccagaaccagcttagacctccattgagagctgaaagcctcttccgataccgagaaccagcactgaaagcctcttccgataccgagaaccagcatggtttttgttttgttttgttttagtcagggtctcttgctctgtcgcccaggctggggtgcagtggcgcaatctcggctcactgcagcctcgaactcctggtcaggcgatcctcctacctcagcctctggagtaactggaactacacgagcgcgccaccacgcccggctaattttgtttattttttagtagagaaggggtctctccatgttgcccaggctggtctcgaactcttgggctcaagcaatccttccgactcggcctcccaaagtgctggaattacaggcgtaagccaccgcgtccagccagaaccagcatcttttctgcacggctggagttgggaattttccacagcttagcgcactgctccttagcttttcgctttgccacagtggaaagcagattttccaagaatcctggcggagccaagatcggctcgcccgcccccgcctcacgctggctcctgataggcagctagagctgtccgttttgacagaaacctttgcgcaggcgcagaaaggcacaggactcgctaagtgttcgctacgcggggctaccggatcggwcggaaatggtgagcgtgcgccggggtcttgtggctggcggccgcccaccaccccacgccaggccttcagtcttccgaggatgaggggatctcagagctccggacagggaatcggtggtggctgggcgtggccgggcccgggccccagccgacttgagggtggaacccggcggcggaggcctctaaagcctgaccgaggcggggccgccggatcccgctgccccttgaccggaagcgggagcccagcctcggccaggaagagatgatgggcgaggggtgggcggcggccctgcagcctagagttttggggccttggtgcgcgatggcaaccctgccaacgtttcccgggagctcagttt

SEQ ID NO: 94665 - DNA, 36677 bp, Homo sapiens
gctggcttctatgtgtatcccaacttgaaatgctctttccagcctcagaacccttgcacttgctgttccccttgcctgaatgctcttcccagctcacctcgtggctcctgccatctccttcaagcttcttggctgaaacggccccttgccaggggtcttctctggctaccaccccagcccccagccattattgcttcttacaaatcacaatctatgactgtataactggttatctgtcctctccctcttctactaggatgtaaggttgtatggacaagacgcccagtctgtcttgttcgtggttgtgtccctctgtgtcaggcatcagtacctgaccatttgtaatgagcattaaatatttcttaaatgaacccgttgtgtttccttggcatgacctaaatgacttccccattgcatgtcctctacttataataagcacttgggttctagttctgatagaatagaagcaaataaatgggaaactcgggcctttgtgcaaggtcagggttgtcaagcctacagacatgggcagatgtttctctacagagcaatgcgcatgaggataaaatacatagcagctgttgattaattaaatagtcctaagctgagttgcagtgagccaagatcatgccaatgcactccagcctaggagagagagactctgtcccccccacaaaaaaaaaggcagcagcagcagaaaaaaacacctagataattcacaactgttgttttttaaatcgtgaataattgaactaaagattggaaaccagagtcagtgtcaatccacagtacttcataataaactatcctatttttcacccaaattctgggcttggtttttgtttgtttgagacagaattttactcgttgcccaggctggagtgcaatggcacgatctcagctcactgcaacctctgcctcccaggttcaagtgattctcctgcctcagcctcccaagtagctgggattacaggcgcacaccaccacactcggcaaattttgttttagtagagacagggtttctccatgttggccaggctggtctcaactcctgacctcaagtgatccacccacctcgggacactgcctgtgtaatacaccagtgttacacagaggattccccaagatttcactctggagttccacatctagagagaaggaggcataccaaatgtctcagagtacatttctattgtatctggaatacacttccgtgattgtcaggacatagattgctttctatgccctgacagggcatgaacacatatgaagcaatggcaaagttttgcttagagtcagtatagcatgacacttagggaatgggctcttcaaccagagcatctggattcaaatcccaaataacacagtaagtgctcaaaatattagctattattgtatttagaataaaaaccaaactactatggtctacaaagtttatgatgttccctgcttctcaaacctcaccctgtcccactctccctaattgtttgcaacccaacttgcctctgcagtttcttgaacggaacattccaagtttatttaccttgaggtctttacagttatttttctcccagtatagaattttcctcagatcttctgtaactggctctttctcacctttcaggttttgggtttaatgtcatctctgaggccttccataattaagctattcaaaacagatcccctcccccaccctaatatgtcacagtttcatttcttttatggcacttatcagtaatttacttatcaccatttaaatataaactcctctacaacaggaaacctcttgctcatttttattccagaacctagaagaactagtacactgaaggcatttgatgtttgttatgaaaaggaaacaacaaaaaaatcaagttcaggctgggcatggtgcctcatacccgtaatcccaagcactttgggaggctgaggcaggagggatgcttgagcccaggagtttgagatcagcctaggccacatattcagaccccattgctaccaaaaaatttttaaattaaaaaatggctaggcatggtggcatacaactgtaattcaagctacttgagaggctgaggtgggaggatcacttgaacccaggaggttgaggccacagcgagctgtgatcacaacactacactccaccctgggcgacgaagcaagacttcgtctcaaaaaacaaattatgttcaaatcctatctcaccataaaaacctagctacaatccccagagaaaaccaaatttcaaatactaatatatgccaggtgcagtgactcatgcctgtaatcctagcactttgggaggctgaggtgcacagatcacctgaggtcaggagttcaagaccagccaggccaacatggcgaaaccccatcgctactaaaaatagaaaaattagccagatgtggtggcaggtgcctgtaatcccagctactcaggaggctgaggcatgagaatcacttgaacatgggaggtggaggttgcagtgagccgagattgtgccgctgcactccatccagcctgggggatagagcgagactctgtctccaaaacaacaacaacaaaaaacaaatactgaaatagatctgggttgtgtactgggtatctgttatattcttaacagcccatcttttgaaaaatatttcactatttgggaaaatcccacatcatgagttctgtcttcctattgtagatatcaaaacacaaattcccagcctctcttgcagctaagatgtaggcatgtaattagactctgcctaccaggcaccctcataaggcttgactcagaaaagaataatgtagtgactctgtttctcgacacatggactgtggctgaagtgttgggctttctgggagagttgggggggcacgtcaagtgaaactggtgagactgtagtggcgtttcctccggtacttgatagggcagcacaacatagacactgttctcctaaggccagttttgtgcatgatttcgggcatcattcctagaagtacagccttgaatctgtccccaaaattctcaaaagcacctcctatcactttagtaaaccttttaacacttagctagtcagcttctcttgcctgtcccctgtgacaaccaggtttataggaactacaactgtctataactttaggacttcagtctttagaatatgaaattgttcctgtgtgtcgctatttgtttcctgctatgtatcagaatcagttgtccctggaagaaggagatgaaaaacacaggccagccatctttgttctccactccaggtcacagtcatttacctccataactcgttggcaggaacagtcataagagacctgcttcatctttataacagaagggtataccatactttaagtatacctgttcaaagaattagttacaatgtttcacagttaaaaagtgatgactaattttgaatttgttaaataccaccctcttataataaaacaagattctatatcacaaattgcaaactggtaagtaaatctggtctacaaagggtttttgctggcttatgatacatttaagctttaaaaaaaatggttaacagaaatacaaagattttatagttgtatctgtgatttctgccattcttaaaaaaacaacagcagcaattgatgattataagcctgcatgcagcaagcaggaggtcacaggcccccttctgacaagccattagttcatctggccactgataggcactcacaaatcaaatttttacttataatgttgttgtatatattggaagttggtgagactacctactattttatgaaaatgttaagtaaacaaacataaaaacattttacattagtataaaatgctggaataaaaaaacattaaatcaaaagagaaaaggcaaattaaagggggagaggcaaagggttgggactttgacttgaaaattccaaagcaagtcaaaccatagtatgcaatttaaacgatgtgatatgtgtgcaacataaggtggaccctgaagttaactttaagaaaacagtagcaatttataagagacactgacagactacaaaggtggtttcctttattttggtaaactttaaagatctcgggagggtgtggtggctcacgcctgtaatcccagcactctgggaagtcgaggcaggcggatcacgaggtcaggagttcgagaccagcctgacaaacatggtgaaaccccctctgtactaaaaatacaaaaattagccaggcgtggtggcgtgcgcctgtaatcccagctactcaggaggctgaggcaggagaatcgcttgaacctgggaggcggaggttgcagtgagctgagatcgcaccactacactccagcctgggcaacagagagagattccatctcaaaaaaaaaaaaaaaatctcattttgatactaattcaaaaggccaaatagaatgaccctctttctgaataattaaaacaatttacattttaaacatgtatttctgtaggatgtattctatcatctgaaatattaataagatccaagaatttcttaactgaacagtaaacagatccgaagtatataatctgtgaaaatgatttagaaagcattttgactgggggaggtggaaaataaggacatgtaaatgatctgcagtttaaaatgcaaaatcctgtcacgttacatctcacatgtccaagacatcctccgtgtgctgaaaaaaaaaatgatggttctcagaaacggtataatccattaataagtcattcatccaatacataacaatttttaaaactccttataaaaaggagtccacgtattcacagatactgtagaatccccagctcctatgtatattaccgaaaaatgcaaacaagtgtatctttgaggtattatggcaatccacatctttctcatcagactataccagtcacctcagtactgtggaaatgttccatcgattttggcagcccaggccatgaggccccccacaacatcccgaactgttaaagggtctaactcttgagctgctgataaggactggaggatcttcacggctttctgtgagtcatttcccagtttgcaaatcacataaatggggacagcagccccttcttgtgtgccctgcttctcttcccagattgcttcttttaagagtttcaggctctccgcatccctgcgttccaaatgtttcagagggatgtgtagggcatgaggcaaacgacaaatgtccacctccacctgaggcctgacgtccagcaacaggtggaatgccccagaatccagcagtcgcttatagtcggtgacagaaacacgctcctctgggctcagtagttgcagggagcggcatttatcagtggctgaggagccacagaaggcttcatagtccagcagatcagtcacagtgggccgttccccgcaagctgcacagtcgagcctgcggctccgcagccgaatagagcggaaatgccctctcagggcatcaaagagcaacaagctgccactgtaagaggggcccagacccgcagcgattttcagcacttccaaggcctgcaggcagcccaggaccccggtaacgacaccgagcaccccgccgtccgcgcagttggtcactgtctccgctgggggtggttgggggaatatgcagcgatagcaagggccaccgtcataatggtagactgtgatttggccctcgaagcgcaaggcactggcagacacgaggggccgacccgccagcacacatgcgtcattaaccaggtagcgagtgggcacgttgtccgagcagtcagccaccacatcatatcggcggaccaggtctagggcagtggctggcgtaagggcctgagtgtacggcacgcattccactgccgaattgaggcggcgcagcgaggcggcggccgaaaaggccttggcctggccagccagtgcctcgccatgcagcacttggcgggccaggttgctcatctctaccacgtcatagtccacaaggccaaggcggcccacgccggccgctgccaagtactgcgctagtggacagccgagcccaccgcagcccacgattagcacgcacgcggtccccaggcgcagctgtccgtgcacgcccagctcgggcagcactagctgccggctatagcgcagaatctcatctcgggacagagcggccttcggcggcagcggcgacaccggaaccagccgttctggctgcggttcctgctcagccaaaagagccgacgccagcttctgcttcagcgaattcaattcctcctcacgttgggcaacttcagcttgtaaggckagtacctcctcccgggaagccatggcgacctcttccggaagttgtcgtgaaaggcatttccgcttccgkcttctgtctcctagcgactgggataaactaaaaaactttatggagcttgggaaaaggtgatgaatagatatttacttcctgaagaaaccttcagattaaacttcaaagatgtataaatccagaatatttctaattgaaccacgcaatggccctagaagaactagcgatcaatcacacaggtcatcccccgcttccgaatttggtacggtccgacccgtccttttccgcgccacattacgtaattccgcttccggcatctggctcagttccgccatggcctccttggaagtcagtcgtagtcctcgcaggtctcggcgggagctggaagtgcgcagtccacgacagaacaaatattcggtgcttttacctacctacaacgagcgcgagaacctgccgctcatcgtgtggctgctggtgaaaagcttctccgagaggtagcgcaccaggtctccctccccgaagaatgagatgagctggcttccccggcccgggtgtcggcagctggctgcgcgaagcggccctgtccagccttctttgcctcacacaggaaggcccggggagagggccaccctgcgagggaagcagaggcggatgcttgttgggttttcttcgtgtcctgggttctcattcctgcccttgggttttgtgagactctcatttatctttattatgtagtactcccgtcccccgcctttccgtagaaaggttggccactcttttacttggaagcgaggctgaaagcgtgatcccactcctccctctaggcggtcaggatctgcggcaagagccgggagtccaagcgagagctctcactctccgctccggtgccgagtgcttacataagcatgaggtttggtgtgtgtgggttagggagctattgctgggcacgataacctttctggaaaggagaaagcagaagagcatcttcgctgatcactggtggatgtttggtgtgattgttagaaccgggatggggggtgggtggagttcgaatttggaagtgttaatgcagtgtttttaaaaactgcaaaaaatcctggagtcagtacgaagtaacttgttttacgattgcacaaatgggatcatgctgtgaaatctttgaagactttttctcatattaacatgtacaaacatagcaaattactttggaagttaggtaacattccatatggctgtgttatttatttaatcaggtcatggcaatgaactggattatttccagcgccttttggttgtttctgttttttggcttttgctttgtcgatgagaacaaggactttgttcacaccatattttccagctaaatttagaaaagtgcttgacacatagcggtgctcctttattgcatcagtgttggcagcagacgcgttcatacttttacttgtgtactagggataaattcttcgaggtaggattgctgggtcgacagaaatgtgcttaaaatggacagttactgccaaattgctctaaagaaaaaaaaggttgtacaagtttggactctccattcttcagagtgcctgtttycctatcaaccagcccgcctgagcattagacttaacattgttggaagtactcatttgtgaaaaccattgctgttttgattgtatttccttgaataactgccttcatatgccttgcccctcagagttttaaaatttttatttttcctgtttaatcttttaattttgatttctataagctctaaattaaagaaaktaactatcatacaaccgatctcgttcagggcttgtattctaattttgcaatttttttttttgctgttttaatttttttatgtagtacaatttatgtttccttttaatggtttgtgaatcaatcttttaagatcaaaatgaagtttgataaaggaaacaaaacttttcagatgcaatcaaattacttgaagtcagcccagcttggtacctttgagctgcctcaccctcaggtggtgtagctgctttgaagtggtaggggacagtaatttgcttttaacgaccccattttgtttatggaatttctctttcagcacgtctattaaaatcaccttacatattttggcatgtaaaggcaccagtgcccagatttaaggcacagtgggaagccaaagtcattgttctactcttggagaatagataacacaggggtttgctttcttgtcttcaaagtttgctggggctgacttgttaaagcctttaacagtggaatatgttttctggttgattttcttgtatttgtttcttttttctttttcttttttttttttttcttttggagacggagtcttgctctgttgcccaggctggagtgcggtggcgccatcttggctcactgcaggccccgcctcccgggttctttttagtagagacggggtttcactgtgttagccaggatggtctcgatatcctgacctcgtgatccgcctgcctcggcctcccaaagtgctgggattacaggtgtgagccaccgcgcccagcctcttgtatttgtttcttaaagcaggaccaagagaaaacggaatgttatgtcgtaggtattatttatccaccaagtattgtgttggtttgtttttagactagaaactaccacctgagattaatgggaagtaacagatgttaattctgaagcacagtggaatcttttgtaatgctactctgcttttgtttttttaatttgataatgtgaggtaataggcacaactatttgaaattgtggtttaagataatgtcaccattctaaaatcggtttttttaaagatgaaattaaatcagatttatacttgattattctatttggatcagattaacaagaataatcactgagttactcagtttggtttgagttaccatgtaaagtacttttgaaatattttatgtaactaagatttgctattaaggttcagaatattatttccaaataggtaataaaatttcatatggctgggcacggaggctcatgcctgtaatcccagcattttgggaggctgaggcgggcagatcacgaggtcaggagattgagaccaggctggctaacacggtgaaaccccgtctctactaaaaatacaaaaaattagccgggcgtggtggtgggcgcctgtagtcccagctactccggaggctgaggcaggagaattgcttgaggccaggaggcagaggtaagccgagactgcgccactgcattccagcctggcaacagagcaagactccatctcaaaacaaaaaaaattcatatgatacataggtcattacgtgattttcttttgaactaaaaagtttgttctctgtgtaggaattctttaatatctcaggacattagcatgtttcagcaacatactgggtttggaggtaaagtactaaatgtttgacatttatttcatttgataattgaagttttcctcaacgattaatatagcaatacatctccatttatacttttaaggaattagtaatttttaaattacttttaaatttgagaacactgtcatcagtcattaatacaaatttaatttttttagtggaatcaactatgaaattataatcatagatgatggaagcccagatggaacaagggatgttgctgaacagttggagaagatctatgggtcagacagaattgtaagttataagaacatttttctgtgatatgaattgtgattatgtaggggaaagatgagacatgaacaatgcttaaattcaatctatttgtttagaaactgaaaagataaagagcaacttacgcatktgggatttaaatgcatttttgttgtccgtaaaattttacatatctttggtatgttgggtcagtggtcattttacagcaaagagtgagcttttggatgaactctgtttataactaattctgcagataaattttcttgaagggcaaaaattaaagcatgatactgaattgacaaggaatattatataattgggttataattggtagtgtgtgtgtgtcttaatctttcttgctccctttcggtaagtattctcatgctttcattagagaatactgcctgaaattaagagcgtgtaggtagaaaaagttactgttttcttgtgaaacattaatgacttcttagagtacttggcatttttagtctatagaatagtcttgtgaaagtagattgactgtattagtcctaaactttagattcacccactgtaccttgaaacttgttattctaatatagaagttacttaggcaaatatagagtttattttataatggcttcatgaattttatttttggttaccggtttgtatttacaaatgtttatgtatactcgagctcttttataatttatattcacaaattattgcagaccacagtttttcagtcttggcactattgacgtgtggacagattaattctttactgtgggggttgtcgtgtttattgtaggatgttcagcaccgcatctggactcttctcactagatgccactagaaacccccctccccacttggcaactgcaaatgtttggatattgtgagatatttccttaggggaaaaattaccctttgcctccagtagagaaccattggtatagagaaagaagtccctttgagaacctttattgttatttacagttcaagaaatggtaaattaatcattttaaaaaaaagccactcagtctaaatattcttgataaatctcagtaatagaaatactttctacttagaggtgagtgtcagttgtatgaggtcttggtggcaagagtttaaaggaactgtgttactacatggtaaatgtagttctaggaattctttcagtctgtctcacagatgagtaactcaggtctgtcacacctcaagtcttctctgaaaaccttctaatggatgggaatacagaaagaggtaaaaagttgacaaattttcaggcttctagcagagactttcagtaatgctaggtttgaatttttggccagtagttccctgttttctttagaagcccagggtgaaggccactgattcacaacacttttgagttatgtgctgccatttaatctcggaccatcaaccagacaacattttgaatacttttgtcataaaacctcagccttaggatgtgattgattgattttagggaatggttactaaactgacctttcaaattttggaacaacattgtcttcaaagacattttttctatcaacccaataaaattcaaaatgagaaaaaaagttgcattcactgttacgatttccctctactaccagataaaattccttattcattcattattttatgacatttaaataagttaaactagaaaatgacttttaaaaaaaaacagtattaatccatgctagggatgacacttgcttttagtgacagatgtatgtttcgttgagaaaatgaaggatattgaaaccatgttagaatacctcagataaagtgttcaccacagatgctttgtcagcctttcagactggctgaaatgaatctttcagaaaagaagccaaagaagatatttttaaaaattctgtaggtgacacaactgaagcgagaggttaggtcatttttaatgacctaactaggtaggaccatagagaaattgggggcacttactctgaactattcacagtgcttacaaggcagagatctgaaattgtgaaggacttcaactgctctgtgttgaatgcttttattatgtttggtttatgtagtttgtttcatctcccaacttgagatcagataaagtcatttatattttgtcatattttcttccagctttattgaggtataattgacaaagttatatatatttaaagtatgaataccacatttggggaatgaacctgtccatcacctcacgtagttacccttgggggcaagttgacagtgatgaggacagttaagatctgctctctgtaaatttcaactatataatatgatactattaactatagtcaccgtgctgtgtggtagattcttagaactttgtcttacattttgtcattattttatagtttagtattttaaaaacttactctgataataaaatgtaacacgtttattattcttaaaacatcaaatgtaagataaaaaggtttgactacttgaaaatattaaacttctgtccattcctaaataccaaaatatttctaacaagatcagtaccccaaccaaccagataattcataagaccaaaactagaaatggccagtaaacaagaaaaaaatactgagcctcactgataagtgaagatttacaaaacaggaggagagtacatattagccttattagctgaagatttatttttattttctcctttctttttaacccagtgtttctgagagtattatagaacaagtccactcaaatactgttgatcctagtataaattgatactgtttttctgaagtatcatctggcagtaatctcatgaccctcaaaaatccttaatgcctttgtaataagtataaagcagtttataaaactgtatatgtactatagtctcaattctgtttttaagtaacttttttcaagattgtctgtgataagttttacaaaggttcttgtcaaacaaattatagtttcccataaaagtattttataagcagctgtggcaaacatgcttcaaaaagtatatgcctgtcattcttgcaagcactttatgtgaatccacttgcttgttcctcatgaaagccaagtgagagggggctttgtcacgcctctttatattctcaagatcacatggcaaatgagtagtggccaggattcaaayccaggcattgtggttccagggttcatcttcctgtctgtaatgctatcctgcctcacatagaaaggggccatcagattgatatgaagaggcaaaaaaggatcaggggagggtggagaggtggaattaagagtctgaaagtaaagcataccaaatagaaatagtttggatttcctacataagaaataaacaagcacatccttgtaaaatataaatgttaccagtaaaaccgaagttgcctttgatgaacattttatttatttatttatttattttttttttgagattggagtctcgctctgtcgcccaggctggagtgcaatggcaagatctcagctcactgcacactctgcctcctgggttcaagcagttctcctgccccagcctcccgagtagctgggattacagacctgcaccaccatgctggctaattttagtatttttagtagagactgggcttcaccgtgttggtcaggctcttcttgaactcctaacctcaggtgatctgcccacctcagccccgcaaagtgctgggattacaggcgtgagccaccacgcccgacctgatgaacattttctataggcatcccattcccttgcacaggggagacccaggtcaacagtttggtgcgtttttttgtgcatatatgtgtgtatgtgcatttgcagaactaggtagtgtggtggtcttgttttttaaaacataactgccatcttcctgtatcatcattacttctaattctgtcttggcgatcttttgtcaccagctcacctcatttctgttaatggctccataatactctaatattttatataaacctttgaagattctgaaaattataagtatcatagtctccttgtccatggttttgctttccgtgatttgttacctgcagtctgaaaagaggtaagtacagtacaagaagattttttgagttagaccaagttcacataacttttattacaatatattgttgtaattgttttattttattattgggtattgttaatctcttactgtgcttaatttataaattaaactgtgataggtgtgtatgtataagaaaaagtatatataaggtttggtactattggagatttcaggcatctcctgggggtcttagaaagtatcacttggggttaagggggtgtgcaactgtaacaaagttatgtttgtttgtttgtttgtttgtttgttttttgagacggagtctcactgtgtcactgaggctggagtgctgtggtgtgatctcagctcatgcaacctctacttcccgggttcaagcgattcttctacctcagcctcctgagtagctgggattacaggcacgtgccactacacctggctaatttttgtatttttagtagagatgaggtctcaccacgttggccaagctggtctcttaactcctgacctcaaatgattcacccgcctcagcctcccaaagtgctgggattacaggtgtgagccactgcatctggccaaagttatctttttttaaaagaaagattttccagctaaaacagagttgtagaaaatctcagatgagctttaaaaaatttgctttttcagggcagataccagatggggatcagtattttgtcagaaattattcacaaaatcaaataaaatctagctgtgatctgatatatcctgctcgattttgttcagtgacttgcaattatcatagatgcttatttgaatgtctttccttcctgtaagctcttaccagacagcagtgtattttatccatctttatgcaagatgtactttgctatagatacaaattgtgacttaaaattttttaaatgtggggatagtggagtaaaagtgtagaggatttctttttagcagttagagttagattgttatcagcttaaaatagcctgttatcactataagatgggttttgtaagtctcatggtaatcataaaggaaaagcctaaagtagattcacaaaagataaaaagtaaggaatcaaagcataatagtacagaagataatcataaaggaaaggagaaagagaaagaagcaaaagatctacaaaacaactagaagcaattaacaaaatggcagtaggaagttcttacattacatgtcggtaattaccttggatataaagggattaaattctccaaagacctggagtgactgaatggattttttaaaaaagagccaactatatgcttcccacaaaagacttgacttgtaaggatacacatagactcaaagtgaagggatggaaaaagacattccatgcaaatagaaacctccagcagattgcatatagtgaaaaaaaaaaaaaatcatctgctttaattgaaaatgctttgttgagagatttgcagtcagaggcaacctgcttatatactggcaagtgtagaaggggacaagatagacaagacatgctcactaatgagtctccctgaaccccatacctcagaaacgtagggcacagtgagaactttggcatttgacttttaaagtgtccagccaaaaggaaaaactaaacaagtaaaagtcaggctccaactattaagcaaaaagatttaggaggactaagtgattgaccaatagtaagaaaagagaaagaatttaattaggaatatgacatgtccttggaccagtagaggagatgaggtcatccaagcataaggtcaagataagttaatagaggaagagtgatattagtattcaaaacccaaagggaatcgagagaacaaacatcagatttcccaagaaggtgcaaaataatgaagtaagtcctacatttttctaggaaggaatcaatagatttaaaaggaaaatcaaatatagatgtaaagacatatttaaaatagagtgagtgacaccagaaaaaaaagtttaaaattgtgattgtagggtcagggttaaagaatgttgctttgctggacgggcgcggtgactcatgcctgtaatcccagtgctttgggaggccgaggcgggcggatcacgaggtcaggagatcgagaccatcctggctaacacggtggaaccctgtctctactaaaaatacgaaaattagccgggcatggtggtgcatgcctgtaatcccagctactctggaggctgaggcaggagaatcactttaacccaggaggcagaggttgcagtgagcggagatcacgccactgtactccagcctaggcaacagagcgagactgcatctcaaaaaaaaaaaatgttagctacgttaaactatttggtttgttaccaaatgcttttttttttcttttggcaaaaaaatattaaggatactttgctttaagttctaacaagtgcaactatatttctattaaagtgagtatgcacttttgaataagataaaatttaacatgataagatttctgtttctgtgtgtaaaatgctatttcttattcctacagcttctaagaccacgagagaaaaagttgggactaggtaagtcgtgtaatctctaacccctcacacctgctgcttgcttggtgacatgatccagtgtgtattttcccagtttggaatagggccaaaatacagtaacttcctatgatggtttttaatgatcttaatgacatttaaatggtataacttgggtcgcctgtataagtcaagacccactcaggaaaacagaaccactgtaagtctttcagtgtagggaatttaatactgagtctctggttacacccctgaaggagttcctgagaaaccaaatggagcagtgaggctactaagattagtaacagctggaggtcactgccacccctagggatggagcaacggcaggaagagatgttagagcccaagaacctgggctgcccagagggagctagaatgatggggcaggggctgcctggcaggagctagaactgtgggaaattcccagtcagaggtaggagggagagtaacagagggaggaccacttagacttttcccttttcccctccctgcagtcttccacctgtacctcccaaagctgtttggcagccagttgacaagagaatctggaatatgtagttcacccaatatagcacagagtagggaagggccagagaatgggtctgagggcaaatatcttggaccagcatgctgcaaaccttggaacatcctttaagttacaagtttaaaaagttactcttcatttaaggctgggcacagtggctcacaaatgtaatcttagcactttgggaggccgaggtgggcagagcacgaggtcaagagatcgagaccatcctggccaacatggtaaaaccccatccctactaaaaatacaaaaattagctgggcgtcgtgacgcgcatctataatcccagctactcgggaggctgaggcaggagagtcgcttgaactcaggaggcagaggttgcaatgagccgagatcacaccactgcactccagcctagtgataaaaacagttattctttatttttaaaaaaggaagcttttccagcttttaaacatacagcattattgaaaagctcatatgagctcagtaattctgagaggaaactctgcctttatttgtgctaaaacttaacatgaagaaagcacaatgcttaactggagtctgctatcttgaagaccatcaattcccaagcatcaaatgttctcagtatctgaacccagaagattctttgggattcaaaaaaatctggaaactgccatgaaaccaaaaagtgtaaatattcactcctttatctttctgagacagtcttactctgatccccaggctggagtgcagtggcacaatctcggctcactgcaacccctgcctgctgggtttgagccattcttgtgcctcagcctcccgagtagctgggattacaggcgtgtaccaccatgcccggctaatttttgtttgtttgagacggagtttcgctcttcttgcccaggctggggtgcgatgacgcgatctcggctcaccgcgatctctgcctcccgggttcaagcgattctcctgcctcagcctcccaggtagctgggattgtaggcatgcaccaccatgcccagctaattttgtatttttggtagagacggggtttctccatgttggtcaggctggtctcgaattcccgacctcagatgatccgcctgcctcggcctcccaaagtgctgggattacaagcgtgagccactgcgcctggccaattttttgtatttttagtagagatgaggttttgccatgttggttaggctagtctcaaactccctgacctccagtgatccacccatctcagcctcccaaagtgctgggattacaggcatgagccaccacacccagccgatattcacttcttaacaaaataagttagaagagttcagccttgctcataagacacttgtgaggggtctggactagagaatgcaggaatccccaagtcctgctcctaacaagttaccctagcctgccaagtccctgtgggactttgaggcatggagctggctgagtaattgtcacctaggcctttggccccaaataccagagcaagggtctagcgtaccaggtttacggtgtaaaagacaagaaaaagggaattgaaatgttttggatggagaatcaataggacttaattacagtttagaagttatggttaaaggcaggaaatcaagaatcatctctagacctgtggatggagcagttggatagttggtgcctttcctggagaggtggcctgtaagagagaggtagagaattggaagatgattttgcaatgttatctttgagatttctgaaatacccaagtggagatattaagtaggaagctgatttgtaaatgtggagctcatcagtgtcttagggggatgccaaggaaacaccagatgggtttttaaagcatgagaatgtgataattgtgctacataatcttagacttttgaacttataaactatttctttgctatactgaaatagaggtatgatctattgtattaaattgacatctgaatgggggtgtgtggccagctaccttcttgattatatatgtaatatacatgaacttatgtacttaaggtgaaaaataccaatttattaatctgacttttagagaactaatgtgtgctcttcaggtgctaaacaatttccttgatgttcaaatgtatatgtaaagatttctgttgattttcttgaatggatctactttcatttttaggaactgcatatattcatggaatgaaacatgccacaggaaactacatcattattatggatgctgatctctcacaccatgtaagtggtatgtttctttattagctatttatggtagtcttagcctgttttactgacttactgtttattcttttcaaatttcagccaaaatttattcctgaatttattaggtaggtactatttctaatatttgaaagaaatatgactggaaacatttatcttactggttttgggcttattttcattttttattaatcaaaaatacacatactattttttctatcaaaaatataaacaaagtttgggaagtcagggtaggagggttgcttgaagtcagcagtttgagaccagcctgggcaacaaaacaagtacttgtctctacaaaaaaaataacaaaaattagccagacacaatggcatgcgcctgtagtcccagctactcaggcggctcaggtgggaggatgacatgagcccaggacttcaaggctgcagtgagctatgatcatgcctctccattctagtcttggtgaccctgagacagagtgagaccttgtctctaaaatatttatctgtatagatagtagacacacacacacacacacacacacacacacacacacacaacacacatttgagactaaatgatgtattttaggagtcctgaggagcaaatcaacaggtagttcgttatctgaattctttcagaccacagaaaaaggtggaagatggcttctctgataaatggaattaagccttgagttattagaataaaacaccgtgaacaaaagggtttattccaggaatgccagaatggctcattattggtaatcacttataattcattcattatgttaacaaagtagtgtggttaagtctgtagatgctaaaggagatattatttactaccattttctagttaaaactttaagaatagaaggaaacctcttaagcataataaaaataacccagtcctaatacaaataccacaccaaatagtgaaatgctgaatcatttccaatacatgcattaatacaggcatgctagctatcattaaacatggaaatgttaatacagtaagataagaatttagttaaatgttagtaaaatatacacagttatatttgtttgtaggcaatataattaaattcttagcccaaaagaccacaaaacctctgtgaataagattttggaagctgttctgagtttaagctagatacataaaaacagaatcagattattgtccctccagttcagggagttcagggagttcccactaacatctagggaaaaatccaagttccttcccttgtccctcaagcccctatgtgtttgttggcccctgcctccctttctgacctctgccttgtgctccttcctttttgctttccatgccatagcatgcttctgagttcacagagttccattttcctttgcctgaaatgctgtttccatgctccttgatgaccatctgctgctcatccttcaatctctgcgtaaagtcaccttagaccttttttggttatatctccagtatacaaaagcctctttaacctgtagagtagaaaatgggcaaaaagatacaaacagaccatctatagaagaaatccaaatggctaataaaagaagacgttcttcctgggatgtagtcaaggaaataaacacaaaataactgtgtgtgaccattttattatccattagtttaacaaagttaaaaacttttagagcagtagtaatatccagtaccaataagatggtaaaaaatggacacacaaatattgctgaaggaagtataagttgctataacccttttggaaaatatgtgttcaaatttgggaaaatatgtgttagaattaaaaatactcaggcttggccgggcgcagtggctcacgcctgtaatcccagcactttggggggccgaggcgggcggatcacgaggtcaggagatcgagaccatcctggtgaacacggtgaaaccctgtctctactaaaaatacaaaaaaattagccaggcatggtggtgtgcacctgtagtcccagctactcgggaggctgaggcaggagaatggcatgaacctgggaggcggagcttgcagtgagccaagatcgcgccactgcactccagcctgggcgacagagcgagactccatctcaaaaaaaaaaaaaaaaatactcaggcttcatttgggcaattccagtatattccattttggggagtctaagcagtaatacatttataaaaacgtttattgtggccaggcacagtggctcatgcctgtaatcccacactttgggaggctgaggcgggcggatcatgaggtcaagagattgagagcatcctggccaacatggtgaaaccccgtccctactagaaatacaaaaaattagccgggcatgatggcactcgcctgtagtcctagctacttgggaggctgaggcaggagaatcacttgaacccgggaggtggaggttgcagtgagccgagatggcgccattgcactccaccctggcaacagagcgagactccatctcaaaaaaaaacaaaacaaaacaaaaaaagtttattgtagcactgtttattgtggttgagagggtagggcaccatggaaacaaccacagaggtgtgtgagttgaatattctatgaagtagttttgcaattattaaaaagaatgggaaagagctctcttgacctgtagggatgtctatgattccatgatttgcattgtttttgttttgagatggaatctcactctgtcatgcaggctggagtgcagtggcgcagtctcagtcactgcaacctccacgtcccgggttcaagcagttctcctgcctcagcctccagaggagctgggaatacaggcacgtgccactacacctggctaatttttgtatttttagtagagacagtttcactgtgttggccaggctagtcacaaactcctgacctcaagtgatccacctgcctaggcctcccaaagtgctgggattacaggcgtgtgccaccacatctgaccccatgatatgtattgttaactgacagaaaccaggtcacaaaatgtactttttttgcatcccaattttgtaaatgcaaccaaaaatcctaggggtgtatgtttgtctttatctttctctaggcaaagaaaagtgtggcaggacatcaggctgtttttagtattatttgcttcaaagaaggcaagaacagaatggaagggtattgggaaaattaattattttaatttgagagacaaggtcttccattgtcacccaggctggagtacagtggcacaatcacagatcactgcagcctgaacctccctggctcaagccatcctcccattgcagcctcccaaatagctgagactaaaggcatgtgccactgtgcccgactaattttttttttttttttgagatggagtctcactcttgttgcccaggctagagtgcagtggcgtgatctcagctcactgcaacctgcctcctgggttcaagtgattctctgcctcagcctcctgagtagctgggattacaggcacccgccaccgcgccaggctaatttttatatttttagtagagatggggttccaccatcttggccaggctggtcttgaactcctggcctcgtgatccacccgcctcggcctcccaaagtgctaggattgcaggcgtgagccactgcacccagcctgtgtcgacttctcttaaaagttttgtttgtgtagctcatgaaaatgactgttgaaagctcagtggctttttctaattgacagctaatttattctacaggaagcaaaaggagggtaattttgatattgtctctggaactcgctacaaaggaaatggaggtgtatatggctgggatttgaaaagaaaaataatcaggtaggtacatgtgttacaacttctttattagtataactactggaaatgtattcatagcaagtatttggattagctatcatgctgcccgggatttgtgggatcaggttataacttccagtaaatactcccagatagtttcttacagtttttcctgtgattagagcctggatgttttttattaaggaaaaatcagcataaacctttggacctttggtagaaatggtctcattcagcaaaagttactgtactggaccttcagttttaatttatgtgacctgttctatacttttggtctaaatatgtagggtttctccccataattatagtgtaattttaattaagattgatttcagacagacctgggttaaagtcttaactcactgcaacctctgcctcccgggctcaagcaattctcctgtctcagcctcccgagtagctgggactgtggacctgcaccaccatgcctggctaatttttgtttcatagagatggggtttcaccatgtggcccaggttgccctcgaactcctgagctcaggtgatctgcctgcctcagcttcccagtagctgggactgcaggcacgtaccaccatgcccagctaatatatataatatgaatatatatatataatatgaatatatatatgaatatatataatatgaatatatatgtatatgaatatatataatacgaatatatatgaatatataatatgaatatacatattatatgaatgtgtatatatattatatgaatgtattttatttatatatatatatatatatatatatatatatatatattcacttttttttttgtagtgatggagttttgccatgttgcccaggctggtcactcctgggctcaagtgatccagccatcttggcctcctgggattacaggtgtgagccaccgcgcctagccaggtctcctttcattgactaaaaatttctattttgttctagataaataacatttttatgaaattaatgttacatttatgaaattagtatagcattttaacactgttcttcgatgtgtttctcttgtttataaattgtattttgtaaagaagatctgattgttttatttggcagccgtggggccaattttttaactcagatcttgctgagaccaggagcatctgatttaacaggaagtttcaggtacagtgaaaatttccactacttttatataacttcttggctaactttctttacaatggatattttaaagagacactttacatttctaccttgtttttattctgggatactaaaaaggcagactaaaattcctagaagttgctaatgaagcctaaacatctcaaggagacatattgtgcttttcctttaaaaagctgaaggcagttaggtttgtgtgcttgttaacattagtattaaggctcaactgctctttggaatgttgctattactgataatctgttccaaagaatagcatgtacttaattttctgcatttcatatgaatacctacagcattgtctacagaaaaggttaaactctttaatatttatatagagctctctcagttaccttgttctccatatgtttgaggaaatttttgttgttcaatttggacaaagcttcggtccctctgagttttgcgtgtctgtttctgggtgtatggggtggtggtctagatttgctgtagtagatgtgagctgctttgtgtgactgaccatggcaaatgacaaaacttgccagatttttttttttaatctctgaaactataaaatgcccctgcatctactttagtgacccccaagccccccaaacattacttaataatttctactagttgatacttttttccactaaataatgttgattcttgggtcctttgcttaatgcaggaaaatctaggtccttaaatgtgagaattgacacacacacacacacacacacacacacacacacacacaaattaggacctggctgttgacagtcaaaaagaaaaatgaagcctctctagaactaaaatgcaaatagactggagagctgaacttggggatgaaagagaggggaggctataccctaaggctaaagagtcatttgtgatatgattaagatctctgattgcggatgggcgttggctggtggatgggcagtggcttgcgcctataatcccagcactttgggaggccgaggcatgtggatcacttgaagtcaggagttttaagaccagcctgggcaacgtggcgaaatcctgtctactaaaaatacaaaaattagccaggtatggtggcgtacgcttgtaatcccakctactcaggaggctgaggcaggagaatcacttgagacccagaggcagaggttgcagtgagccgagattgcgccactgcactccagcctggcgacagaggaagactgtcaaaaaaaagccaggcattgtggctcacacctgtaatcccagcactttgggaggcctaggcaggtgaatcacaaggtcaggagatcgagaccatcctggctaacagtgaaaccctgtctctactaaaaaatacaaaaaattagccaagtgtggtggtgggcctgtagtctaagctacttgggaggtggaggttgcagtgagctgagatcgcgccactgcactccagcctgggcagtagagtgggactccgtctaaaaaaaaacaaaaaaaaacaaaaaagatctctgattgccatgtggcaacaatgcaaagaatagtggcactcacaaaatctctgtacagcgggaagggccagtgtggatttcacaggccacagttttgatggttttgaataaaaacctagggtaactggtaactagttgtgaagatagaggctgtgaagaaaaacacagcagggagaggaatggggtgagggtggtttgctgcatcagaaccatacaaggattagtggaggggatgggggttgaaggatggcctgggagttctggattttcatgtattgacagcaatgattagctgtgttctgtataaatgacagagcagccaaacagacaaaagtgaacctgttaattgcacaatttttttttcttttttctgagacagggtttcgctcttgttgcccaggctggagtgtgcaatggcgcgatcttggctcaccacaacctccgcctcccaggttcaagagattctcctgcctcagcctcccgagtagctgggattacaggcgtgcgccaccatgcctggctaattttgtatttttagtagagatggggtttctccacgttggtcaggctggtcttgaactcccgacctcaggtgatcctcctgcctccgcctccccaagtgctgggattacaggcatgagccactgcacccagcccaaaaaattttttaaataggctgggcgcggtggctcacgcctgtaatcccagtacttggggaggccgaggcaggtggatcacaaggtcaggagatcgagaccatcctggctaacatggtgataccccgtctactaaaaatacaaaaaattagccgggcgtggtggcgggcgcctgtagtcccagctactcgggagggtgaggcaggagaatggcgtgaacctgggaggcagagcttgcagtgagccgagattgcactgcactctagcctgggcgacagagtgagactctgtctcaaaaaaaaaaaaaaattttttttaatagttaaatctcattgtcttctcataagagtggtggtttcttaaatacatgcattaaagttcatttgtcgctagacaaagcccatttttgtcattaaatccctagatttaggaagaaggtgctttttacaaaataagaaaaggaatcctggaaaggctacagtcaatataaagccatttaatagcatagaccacctggatcctaatcgcatttatgggattatatggcttcatgtaacattttattttactagccacagtgttaaagttaccatgtggatggggaggaaggaggtggcagtgaaaagaaatatcttagaaaatgattcttaaggggaataaagcaactcttaaagagaggaaatatttcatagcctaatcccaattttaaaggtaatgctggctggatgtggtggctcacacctataatcccagcacttttgggaggccagtgatggaggatatcttgagcccaggagtttaagaccccagctctggcaacatagtgagtctccgtctctacaaaaactaaaaaaataaaaataataataataataataactttaaaagttattctaagttatttagcaattatttaatggcctttcttgcttagcctggcatggtggcacatgcctgtagtctcagctacttgggaggctaaggtaggaggatcttttgagcctggaaagttgagactgcagtgagccatggttgtgccactgtactctgggcaacagagtgagaccttgtctccaaaaatacaaatatataaataaaggtaatgtggaaacatagtcccatcagtatcatagttcttcccaccccacaatcccagtgctccctcccctaacagcatctgacatattatatatcttcattgagtttttaagttcacttcttaaccccaaaacataaaaaaaaaacctgaaacccagtacattggtcaataaatatttattattgaataaatattgctaccatcagattctcctctctccatatttattccaaattgattcctttgaatccttaaggaaactatgtggataaaggattgcacacactaagctgtcaggtttttctaagggctgtgctgtcctatacccacttcatagtcaaaagataaggtcgccttagaagtctgagggraaaaaaatgtggattcagggtgaaaccctgaggcacagtaggtccagatggccttaactttgaagagaacaaagttacaccaaactgcctcttcttgctttctcccctctccccacaaaaaaaggtagaaattgctgcctccctatgaactgagacactgatctttaaaaaaaaaaaaaaaaaagtgtgactctgaaaatacggagctccctgctatttagttactgaagaaagtgcttgggtctacccactggactgcccaactccgctgtctttgtaaatctggtgtttggcctgcagtccatctaaagttaggctgcacattcacccactgttaagtgtctaactgtgacctcaactggtgataggtgaatcccaccaggattgtttctatcctgtgatgcctcgttcctgttttaacctagcttcccaagctcatcctagagcaacttagtttatcctggggaatttataaaggaaatcatgagaaatcaaaactcatcataaacatttattggaaaatgactgtgaattatgaggttctttcttgtcatctaacatatatagttgcttcatgatcatctgtccaccctgttgttcaatatttggaacagtttctttcaactttaaattttagggaaatcttaaataatggatggttctgcatcaaatgattcattttaccgtatttcactaatttctgatagtatggtgggaaaataattctataaaaagataactgagaattcattttcacaattattctaagttatttagcaaatatttaatggcctttcttgcttaggacaaatgyatcataatcatcaagtgtgcgagcttttctgtttaccaatggccagygaaagttttaggctttatacataccagtgaactctttgaaaggtcaggatacataggcatgtgtatttatccagaagttgatatatatttttaatttcttacagattataccgaaaagaagttctagagaaattaatagaaaaatgtgtttctaaaggctacgtcttccagatggagatgattgttcgggcaagacagttgaattatactattggcgaggtatgcaactgatgctaaatagtgtgtcatgttcctggtaaaggagcagtaaggtttagaatttttataataaaaagtttaactttcataactgctaaattgtggaggtcttctagttgtttagaatattcatgcacaaagggtaaaaattcatattagtacatttgaacagtaagatttaaaacattaacagtcagcattctcttttaaataattaaaagttcctgrtactttctcaatcctagccctttcttctaactaatcagcattatggactgagtctctttgcttcttttccttttgtcaccgccaatggccaccatactttaaaatgaatgatgagttccatatgtccatttcctgttagtaagagaagaccaggaattacagagcaaggaggtggtgatctgtaatatttagggctcgttagtgagctcttagggtagggaagactctcctcatttaatagtaaaactcttattcagagcaagaaaatagctatggaatgtcacttctcttgtggaagttacaagctattttacttaatgctaaaccattgtagctaaatttgacaagtgaaaaatctacgcacaaggccattttacttttggagtataatttttccttgaaatgcaaactgaaacttgagtaaaccaaggtaatacctagaatcagtgctttttaaacagttgcagatttgtttcatgtgacctatctttagataatgcatgtttaattttaaagacttggagatacacacagttgctttcataatcccctaattttatacttactttaaggacctctgttgtaggactaatcctatttctgttgtgttggtaatgtggtataccggctaagctgcctaattgtttttaaagactaacgttacttttttttttttaaactaggttccaatatcatttgtggatcgtgtttatggtgaatccaagttgggaggaaatgaaatagtatctttcttgaaaggattattgactctttttgctactacataaaagaaagatactcatttatagttacgttcatttcaggttaaacatgaaagaagcctggttactgatttgtataaaatgtactcttaaagtataaaatataaggtaaggtaaatttcatgcatctttttatkaagaccacctattttatatttcaaattaaataattttaaagttgctggcctaatgagcaatgttctcaattttcgttttcattttgctgtattgagacctataaataaatgtatatttttttttgcataaagtattgctgccttcattagagtatgtgaatgtagaattttttacatggggaataatttgaaatagtctttttaaaaactggaatcatagatctttatacctaattgatctcagaagtaagrtaatgttaactgatgaaatgtttatggctgtgtctgtatgaattgaaaaagaaatacacacctctgccctttccttaaaaatgtatctcaaatttcttaaactagaaaatacatttagagcaggcatttacagttcggttcttttcagctgttgaattgatgaaacatttcatctatcaaagcaggtctatttaaaatgcatattgtgaattgggaaacaatttgacagcagttgattacatagccgtttttttctcttttgagcaataacctctatcagtaaggaaaaatattaatgacactgaggcagaaacttagctgctacagtaatttttaaacatcttactgaattatataacaatttttttctcaaaagacttgttttcatattatttaaagaccctcagcaaagctcacatccctactaatttgaaaaatctctgccttaagctcttctctccatttagaaaagtgttctgccagttaaaatttgggctaagctatccaataaagccagggcaaatattatgtttacccactttctctaaagtaggtatttcagaagagatcagttaatttctaactgtagcataggttatggtcatgtagtatcttttaaaatttgagtaagggcatgctttgagcaagtaagtttaagttgactttcttctggaaataaaagtaagaggtgtctctaaattatttattgaacagtattcctaattactacattttcctggcttaacttggctgctgaagaaattgaggcccagcacaatggcccatgtctataatcccagcactttgggaggccaaggcaagaggatggcttgagcacaggcatttgagaccagcctagggaacatagggagatcctgtctctacaaaaatataaaaaaagctgggtgtggtggcactcacctgtggtcccagctacttgggaggctgaggtgggaggttcacttgagtctgggaggtcaaggctgcagtgagctgtgatcatgcctggacaacagagtgagaccctgtcttttttaaaagaaaaaaaaatgaaaatctgatttttcatttgcatttctctctgacagattctaccagaaatgaatcccagactataaaacctgtggtgtcatttcgaacattaaaaccaccccctcccacgcttctatagttgaacccatagtacacattccaataagggccactcttgttctgtttcccttatgtccagaactgtccagctggccagtgagggaactgctttccttagggaagaaacttctctcattcataacaagaagaaaattcatcagtgcttgatgtgaaattagttttaagctaagataatagaaatgtaatattctcagtttttttggagtggttagaatttattttttcttaacctaaactcaaagttgagttctcagtgtcaagtatgtggagcagaaattaagtaacaaccttagagaacctaatatagatagtactgccttctcagatactcactagagtagataatgtttgccttttaaatctttttagttattcacacaatcattatcacaacactgtcactcttggaatttaccatagagtatttgagcagtgaagactcatagcatttggaagtcatttagaaaagaatctggaatatttagatgcatttttgtagtaaatctggtgcttaaacactgtaaaattaaatatttacatctgaatccagcatcccattttgctttgtaaatgaggccaaagatgaaatccagatgttttcccttgtatttgtattatcactatatggaatctaagtatatctaagaaaaactaaacttaaacttactttgcttatttcatattagtttttatctgtcttctgcagtgtgtaattagattctttagttttctgaatcaaatgctttgccccaacccctttttccacgacttttttcagctgttttcccttgaaatactgacttggcttttaaagatacattttatcacaattgcagaaatgtgttgtataaaagtttgttaaacagggctaactgaagtcttagatgttgaacagctatgtgtaaccacaatttatactacttgcagcgaactcagattattttcggatgttaagtatggcttgaaactatgttaacttgaaatgtaaagaaacagcaaaagacaggtgtatttacctaaagatcacatattaaggaaacaggcttggttaattcctcactattgacatctattacttgtcaatacatttaaccaaccaatgatactttaaatcataatgttactttgaacaacctactttaaaaggttggttcaaaaatgttgaggagataatgtattggttgggattgacctaaatttacaaagcaaccatgtgctgtcttatgctacccagattgtgggagcaccaaaagctatgtccctaggactacaaagtgtgttgtttaaggatcttgcagagagccaatgcccctattggcaacatcacttctcatccttaagtttcaccagttgggtggcctcaaggcactaggattcccatttttttttttattcaggtcagagaagagtccatcactgtgactgggaagaatgtcaagtcacagggtaacggcggaccttaataaaatctcggcccctctgcaccgaataccccaccaggaagggctaaggcatccatggggttgtgtctcatctcaagtcgctgtgtgaagcacgaggccctcacacctcatttaaggcaggaggcgtcaggggcgaccggccaggtgtcccggcgccttcccgccgcttctcagccgtggaagcgcgggcatctgagcacgtggagccgccccaggccgccccgcacacccctcccgccagatgtagtccaggcccagctgggcccgcgcagggatccccagcacggccacctgactgagtgctgggcgtgctgcggcccgctgcttctgcctccgccgccggcgctgcggccagaggaaggcgcccgccgagcacacgggccccgggagcgcactgcggccattatccgcggcgcctcctagtgggtcaatggcaaatccgcctggttctcgcgagagctcccccctcagtggggattatataatttccctcaagcgggggtgggggtgctgagagcaccctccctcaggaaaagttaggtgcaagcaggggtgggagtaagaggaaccccccctggggaaaagggggttaggggtgctgtccccactgcccccccctatttagctggacaatgagtcctcttatgctaatgaggcacttacgtcacttccgctctttctcggccgccattttggctagggcaggttcggggactcggtccgaggcgcttgtattgtctgctgaggggagacgcgggatcagccccctcccccgcccgttgccgccgccgcctccgccggcccggtctcccctccgccgcccgccgggatccatgagctgaactcccgcccccccccccccggccgccgccatcttgtgccccctccccctcccgcaggcagcgctaagggggattttggcgtcttctcagacacagctccctctctcggtccccgctgctgaggagcgagaggagcgcggccgccgccgcccgcgccggtgaagccgcctctcccacaccctccgtctcctccctccgcccctcctttgtctgcaccgctcgacgacgccgccgccgcccgccgctctgctgcgcccgccgcgccccccggcagcacccgcggccgcggcgcgagccggagtccgccgagccggagcgcgacgaggccccgggcgcgccctccccgctgccgccaccgccgtgccgccgccatccgcccgccgccgccgccgctgtccggcccccgagcacgccggccccgcgcgcgcctcgaggccgagtcaaggtaagcccggcgccgccgcgcgcggacccgcggccctgccctgcctggcttcccgaccccggcccgcgcggccgccagtgcagcctggccccgggcgcgggcgcattgttgttcgcatcgccgccctccagccgcacacacgctcctttgcacaccccggcgccgacgggtcccccgtcccggcacggaccgctacccgactctgctccggaggtccaggcgcctcctcctgcagcccgacccccttctccgccctgtgagcccaccgaggccagcactctgcctggccgcccggagcttttgcagctaagggcatctcccccagccagaaccgagcttctcccatcctggaactaatcccgtccgccccccacccccaaaaggagcccccccacgcacacccccatgccttgaaccagccttctgccaggtctgcccacccttacctgggggaggggggacggggttggggggggcggggagcatgcatggcatggagtgagtctttgcctcccctgtgcaatccttcttccccaacctgccagctttcctcttatcctgaccacagttcaccaccatcccttttccccaatctcagctgcctggtcagcacctctttcgaacattctgagccccaactttgcagtaaggtggtagaaaatggaaatccagagagctgcaaaaagatttttttttaatgtaatgaatggggagtagttttgtgaacacactcgtattcacctcttctttcctctgggaggcctgcctgccttcccctcccccccaaccttgatccctgtctgctggaaaaggcgcgattgcttctcttcctcttctgcccaagaccaagactctaggtctgatatcctttttagccacacacacacaccccccacacacgaagtcttcttaatcttcttgaatttaccagttactctggacacttcttgccataaccccatttcacagacaaaggcttaggagggaaaaagaaccaaactgtttctgtgtttgtcatgttaatgatgtccatccccacacacccagttcccatccctgatgcttcttgtgcctgtatcttgaaccttcagaatgaaaaaaaaaaaaatctcttggatagcttgatacagtttctttagaaatctgcattgttgcttctggtttatggccatggagaaaataccagcccccacccaaaatgcaccgcagccaagtcggctaaaggcgatgagtgttggagtcagtagggggcgcattctctgcactgggtaaggctgcagaggggggaagggcccccgagctagaacaggatgtgcttcacagcgccttctacagaccatgggaaaatgggcccagcaagacacactcgcactcttagttggtgagctgacagcaacatggcgaaggattaagtgagtcaagagcagtgattttacttcttttaaagagcccaccctgcattttagaagttttctccttttactttttcaaaactgttggcccccagtccatatttgttcttgacgaatcaccttggcacatccttggttcggattcccttcctctggagttcttccacctcaagttttgaatgtgtcaccatatctttcctaagtctggtggtaaaggagaaggtttgaaacaaagtaacaggtttgggggcatagctggttaactcccttcttcataggccaaatctttccaattctttgagagttaaaaatcattcttgagagatgttggattaagtgtgtagatgggtgtcatgatttgcaaagccttgttggtaaacatcaagcccatgttgggttcttcattgtcgaactcaagtgttgattgtaaaaatttcgtttccctccaaatttggacttgtaattgccattcattatctcagcagccaaccacctttacaaaaatgttgataccagtcttctgtgagcacccaccttcttagggtgtgttgatttccatagattttactcctcttgttatttccataggtgtgagatgcacaatgcgaaacctaggccccagcttttacaccatgatgcgcagggttgtactttttgtactgaactgataggtggcctagtggttatgccctgtactaccattttgaggatctggactccgtttcctgccttgctctttggaccacattgtcaattcacaccggtgggtatattcattttggagggtgggaactgcagcaacagggaagccagagacttccttctccttggtcaccaccaaaaccaacacttccaaaatttcagcctagccacattcctcaaggaaccggttagagctggttgcagtagtgggttctgaacacttattaacataagaaattacttacagcttttttaagagaaatttttacagatgctaatattg

SEQ ID NO: 94666 - DNA, 80152 bp, Homo sapiens
gaaatgatttatatttgctattttttattttcataaggacaccactaaaataaaatgattaaattataattgtttgcatgtatgtaataaatctatccataataaaagacatgcataaaaaatatacacaatacaatctaccagcacagattaaaagattccctctatttctgaagaggctaaaccttggcagaagataccaatccacaaaaaaaattaatagaaagcaaaaacttatttttatctgttcaagattcatattcctgttcttacctaggattatttcagtaataatagacttttactaaacctgttatacatgctcattgtggatatcacaataagaaaaaggaaaataaatcacccctaatacaaatgtcccaaaataacaaaattttatcacattttgtgtatactttcagctaccacaagaccattccctctgtgtgtatgtataatcaaatcgattttttctcacttaatataccaaagtacatcttcccatgtcaacatacatccatatctattgccaccttcagaagttacatataatttcatcctatggatgcactgaaatttatttataaaatcctttatttgccctctccttaatacattgctattggaaacagtgctgagaaaaacgaattgtatgcatctctaattattttctgaaaatattttagtataatggaatcaatgggtaaaggatacatacctttttaagagtgatgttcaccaccaaattgtttatttaaaaagttaacagcaacttaaactttaagcagtggtgtaagtactactgattttccagatcactagtagatttggaaaaagtactttgaccaattttaaattatagttcttatttctttaaaaaaaattctctgtaaaaggaagacacatttttcattgcaaataataaatgtctatatttatgtatataatgtgaatattttgcaagtatgttgtcttttattttgttaacttttttctgatgtaaggggagttttaatttttgttttctaaatcaacctgcagaatgcattcataggaaggtctttgtcaacataaaaatgtatctgtataaataggcattcgtgttttcttctggcattttctaattttgtatatttaagtttttacgcatattctatcaataacttatttttgtaacataaaaatctagctagttttctccagttcacagacatgtcatttacaaataactcatctttccatacacatatgaaatgtcatcaggatcaggttctaaaatcttacacatttttcagtatgtgtgcattttttattctgttccacacatttatctgtcttctcatcttttagtaaatgaaacctaatatcacactttgatatatagaagggcaagtctttactctgttataaaaattttcttaatgtcatcataagagtaaaaggtagcatacgtaacctagaaatcttaaaaccttgatgcttttatttggtttatctaaaatgaatagagttcacatctcgagaaaaatgagtcttcccacatgcacacgtatgttgactgcggcattattcacaattacaaagacttggaaccaacccaaatgtccataatgatagactggattaagaaaatgtggcacatatacaccacggaatactatgcagccataaaaaaggatgagttcatgtcctttgcagggacatggatgaagctggaaaccatcattctcagcaaactatcacaagatcagaaaaccaaacaccacatgttctcactcgtaagtgggagttgaacaatgagaacacatggacacagggaggggaacatcacacaccagggcctgtcggggggagggggtggggggccaggggagggataacattaggagaaatacctaatgtaggtgacgggttgaggggtgcagcaaaccaccacggcacgtgtatacctatgtaacaaaactgcacgtcctgcgcatgtaatccagaacttaaagtataatttaaaaaaaaaaaagaagaaaaaaagaaagaaaaatgagtcttcctattcaagaacagggaaccatcctctcacttcaaaagatccttctgaggtcattcatgaaataacttattactcaggtgtaggtggatataaaagggatattagattttatccaaagaatttttagcccagaagttaatataatatagaaattatttttctcatgatgcttgtttccataacatatataacattgtttaaaatgtgtacaataaaaataaaaagctatgtttcttaattttttttaaagcactaaaactttcagtaaagtaacgggaattatgagaggatcggaccagctaaagttttgtttgtcgcgctgctcatattgatgaccttgaggttgccacaccggctgctgcgggctgcagagggaacaaagcccagcgccctcggggacaggggtgagccgagagcaggaaagggggcctctccccgacccgccctcctccctcctctgccgggctccagttcctattacctgttcttctcgtctctgtcatccacgccactcttcggcagagaaaggatccgccgcatcgtctctgtccggtgtcggccggcagctctgcggagcctgtcgaaccccttgtccgggtcgtggcgcctgggctgggaggaggcgtggtcctcactctcactcccggcgcccgcgcccaccttcccsgggctgctgaccgagccccagggcagctcgcccttccccctcctgaagcccgaggtcttcttcatggctccgtctaccggcttcggagacccgctggactttccgccgcctccggaaccctatatgaggaagcaaatcgcgtccgccacagcctccaaccaggaaactccgcgactctcagcccctcagaagagaaacggagacgcgccaagcaaagccgttacacggactgtgcacgcgcctccggtgtccctgcgcgtgacacaaatttggccccgagggagctccgtgtgctcagcctcagagccgtaggcgagagcgcctgtctgcatgagtgagcatatgggtgtttttgagtctgtgggtgtcacagagaggagatcgggagctgcctgctcacaggcactttgggaccccgaaagaaaaggctgtgccgagagagttcttccagtcagaggtttgggaatgggggagaagggagtgcccggaatcccgacctcagaactgagcctccgaagtgggaaacagtggctcccccacacgctcaagggccaggcaggtgcatccaccctgccttgcatggcccaggtgtgagccggtgggcagaggggtggccctgggtccagctgagaaggctcccgggattgacaggggttggggttggggagttctgccttcctgcgtggcccagtgctgggaggggtaagggatgagggcaggggtcctatcgctgggctctgacccctcaggccactcagaccctgcccatgtgggcactcaggggtcaggtgttcttagagggaactaagctgggcagggtcaccgtccccttctgcagaggaggaagctgaggcccacgaggtaaacagtgggctgggagtgggcctggtagaccccaatcccagcccatggagaccaactactgagggagcactacaaacgccccttaacggctggatcccccagttttcatgcaatggggtctacactgaccctggggtctcactgggagagagcaggaggtggcttgaggctgggcatgggtggccacgggggcatggactggctgacccctgtgcattgaccacactctccatcccccaggtgtcatgaagactggacatgggcctatcagggccatgggcatgatgtcagccaaggaactcgcggcctgcctctgccaagagaccagcatctcggcctgagcactcccagcctcgcatcgccttcaacctggctgcattcagctgccatgcccctacctccttgtgtggtcagcaccctccaggacttcatcttgggtcacccaaaggccgaggacattgctggccagcaggaaattcatggtgcatccaggaagacttccaagaggtggtggagcagggggcgccacacccagacagctgtgtgtaattgcgcagctgcgggctgctgcgggtgctggccggcagtgcattctgggcacactggactgtgtcaccgcatgcaggctgtggccggagggggaactgctggccgccaaggcctatgtgcctggaaaccagcagggctgctgcaggaggagggctgcagaatgctccagctcagacctgactcagggttttagagggcatagggcataaggctgtggacatagacagccctactgcgcaggaagagcataaaccagccggagggcatgcatgtgggctgctgttagattctgttctcctttgaggtagggaaggatgtgtttctattttatggatgagcaaactgaggcagagtgctggagtgatttcccccagcaacgatggcagatttagctccagggcttagattttaggatcctccctctcaaataccatgatgtatcatgggctttctctccacagaaaattagaaactcagaaatggaaagggaacaatgaaacttacccattctcccactgctcacatttccttctggtttttttgcgtgtgcatataaaatatatctcagaaaattgagtttgtgctgtggatgccatttatatcctaccttttatactcaatagatcatgaaaatcccctttgttgctaattatatttcctggcagccccatggcccatcctatgcacgtgctgttattccttcggagagtcctagatttttgctcttagttgtaacacatcaggagtgacatcctgtctccacgatgttttctccttaagatggagacagatatagcgctcctggatcagagagcactgccacctgtaggatccttgacttcaggagctgtccccctaaccatctggtcacctctcatcctccacccagctctgatgctcactgcaaattgtttgccaacctaacgggtgaaccctcagctgttctgatgagtactcctctgactgctggaaggtgacaggaaggagttttagcaacattaaaaccactgagactggggatttgggggcatcattaatgtcagccccctccccaccaagtgcgcgcacacacacacacacacacacacacacacacacactcttattctgcctcccaggtgcttaatttgtatggctttggtttgctagtgaggaagaactttcttctttcttttatgtgatttgaggccattatatttgtatctggaaattgttaaaattgaggctctgtctccttttcccagtgagaattcatgagcattcccaacattcccacgtggasacagacacatgccacttgtagcccctgtgttaccttgttctgcctacaaacacacccgtgggtccagagaccagcaaggccatattgctaatccaaatttttgtggaaaaggaaactgatgcaggatctgcccagggtcagccctgctgttgagcatctgtgtaacctcaattctgtcatctgtaaagtgcctccctgacagggcaatggagagattgaggggaatgtagggtcgatggctgcaccctgggaagtgcagctgtgggttctggggatggcatggcgtgggggtccctccaaagggacacaggtctctgcagtcctgtgggaaggaagctacccaggccaggtgcatagggacaggatttaccttggcccaatcatctgggtagttgaggggttgtggggaaggggccagcccatcctgagcaactctccccacagggaagccccacggcatgcaccagctggccacactgccratgagttggatgtggaggacgtatcgcaccttctggtggccaacaccctggtggccacctggatgaggcccacaagtccctgctggtagccctctcctgaggactcagatggccccgtgctggccctgctggccttgctgcggctggggagaggctgcttctaygatgccaacccaggtgggctgcagagggcaggtagcagcgggactcttctctgaggagggcacaggccttccgtggcccttgctctccaccccacaacctgggctttggagcaagcaaaccttgttcagccctagttctgccacctgccacaggmyctcacctctttgaccttcagtctcctcatctgtrtcctggtctttyrggttgtcatggaaattagccagagcaggtaccccagggcccagcaggtttcctgcatacrgtaagtgctttgtatttgtttttgctgtggttccgatgatatcggtgaaggtttttgtttgtgtgtttttgtccctatgcccttccatacyayactgcttttcaggtgaaaagaggctatgtattttacatgttstacattacaagaaaactcagaagaattctttttacaaaaggcccaattcaattgtatgaaaagcatctaagaagacagtataaattattgtgacagtataattaaaactggaaagaagtcctcacattaagagttattcctatatatcacaatgctatagatagtgatactgtttctctgtacaaaaagtatgaggcaaaagctyatgcagagcccttgactttcccgcctctaagctagaacatctccagctccttcgctcgtgatgtgccgactctcagaaactcattctgatcctgtgcactttgtactcttcaagaagaaagtgccaattgaaaattgtatggccatcagtgagtttcaaataataacagatgagaattctcctgatatgcctattaaaatagaattagagtatgttctcactatcttataatgttatatcttcctcttaaaatgttataccttcctcttataatattataccttcyttttttcccactggattatccttaratcaccaaaattataactaatttaaggatatatttatgagtcttaacaattccagcacttaggttaactaattataataagcctttgggcagtaaacaagtgcgttgtttgctttaattctagaagtgaaaacggaaggtctatgcccgggcaatgccacagaggaggaagacactggaactcactgagtaatttacttctttctgatccctaggactctatagagtttgcaaaatcttgtgtaaacctcaagcacagtattaaaattctatctgtagactttttcatattttaatttattttgcatatctaactctttagtgatttttttatttgagtctttttacttcaactagcatagtgatcattattttaaattctcagtattaaatgagattgggtgcaattattagattaattgatttttgaaaagaaaaaccagtgggttttttttwaaaaaaaaaaaaacatctattttcatcccattactttactgagcagcccttagagtaaagacagtttgttacttttgcctgatattttcaaaaatggaaataacaacagccttcctcaaatggagtatgggagtctaaagttctgtatggcttcttaaagcatatccaaaacatcaggttcattaggcatcacattcaatcttgttatatttgttaataatagtgtttaaagagaagaaaatccaaaatgaaaagtacaaattatgagaagtctgactcctttattttagagaggaatggactgtggtctgagaggagtgacatagcttctaagagtcagatccaaagcaaacacaagtagcccatccccagagtgtgcggcccrcttctttctgcctctgccgygtggagaccatcttccagtgcagatgctacagtcctgggtatctgagctagagattatgcagaggaggcatccagctcatttcaaatgatcttttaacaatttctgraacagctaaggaggccttagggacttaccatgtggacttaccatgtgttttgtaaggaatctatcatgtattttgtaaagatgtacaagaaaaaatttatgaaattctgtttagcctaaaattcatttaatgttaaaattttaattatatgctgtacaaatttcaggtttggtacacagaatgttgaaattcctcatcttcctcaagattttgaagttgcaaaatataacaccttggagaaagtaagaatctgatttctagttagcaaaaaaaaaaaacacacctgtttgactgtcttctgagtgtttttcctatttgatattttctcattgttttgaaaaattacgcatatcctgaatatcatatattccttaaaatatgagttgattttatttatttatttatttatttatttatttatttatttttgtggagacaaagtctcactatgttgctggtctcgaactcctgggctcaagccatcctccctccttagcctcccaaagtgctaggattacaggcgtgagccactgtgcccggacctgatttttaacagccaagaaaatgtttatgtttagaatttaatgtttaaatttttagtatttatattataaaagaaatgcatgctcatagcaaaaattttaaatagtataaaatatcaatatggcattaaaaataaaagtcctcttccctgttattaacatyttcttgtatttgggaagggaaggtttgacactaagtatttacgctatgttgcatttccattccttttgcattagaaagaaaaacaaaatcccttttttttttctttttcacaaagtcatgcaaatgaaaatcaacactagtgtctggtgtggcatcactcgcctatagttccagctacttagggggctgaggcaggtggatctctcgagcccaggagtttgagaccacccgtttgaggccaccctgggcaatatggcaagacctctgtctctaaaatatatagagagatataaatcgacactagccttcaaagtgatgttccatttgtatttttaggtatgttaataaaacataatttgaaaataacatttccctcattgataaagaaaacatgaaaaatggtayggcataaacatatacagatctatttaygggatggtaaaaatacaggagggaaatgtaccaaaatattaatagtgattgtattgctgtcataggattttaggtgattttaattttcttcttgatacttttctgtattttctaaattatatctctaaatgaacatatattattttataattataatgaacattttcaaatggcacatgtagtttgatgtttcccaagtgcagcttctgaaagcacatcctattttccaggtgggaatggagggaggccaggaagctgtggttgtggaactgcagtgttcgcaggactccagggactgtcctttcctgatatcctcacacttcctcctggatgatggcatgcaggtaatgctgtttatattgagtcctatgtgtttattcacctctgttcataactcgtttcaatgaaccagccagcctcccaacctttttcttcttacctggtgtcttagctcaggctgctgttaataaatgcaacaggctggggagcttaaacaacagacatttatttctcacagtgctaaaggctggaagccaaggtcaaagcgcagcagggttgatttcytctgaggtgaggcctctctctttggcttacagacggctgccttcttgctgtgtcctcacatgatcttctacctgtgggtgtctgtgtcctcatctcttcacatgaggatagcagtcatattggatcagggcccaccsctatgatctcacttaattaattaattacctctttaagggctctatytccaaacacagtcccattgttgaggtcctgggagttaggacttcaggatatgcattttgtaggggtacagttcagccctaacacctggtaaataattttgcaaaggggaaatgtgttctcttttggagtatgggaggtggggacctcaccccctgagtagatcagcacagggtcccactaggagggaatgtttaatgggtgcagggtgtatagcatttttgttcttgttccacatcacttatgggatattttcctaatatttacacctctgaaagcattccactgatacacttcattaagcacctgctatataccaagcaatcgactagggctgacactcaaagatgaaaatagcttcacaccctggcctcagagatcactgtctagaaagaaataacactcatcattacaatccactgtgatacttccaatcctgaatatatatatatgagatattgagggctcaaggtcacagagccctgggaacaataagggaggctttgcagaggccatgacctttgccttaggtcagtatcagtttaagagcacagttccaatctraaataatcatgaaacaaaaataaatttagaattaatgcctgaagttcaaataaaattctgtaacattcaccaggatgccttctcaagtagacattcagmgttacaggtttatttttttttttttcctcaagacagagtctcgctctgttgcccatgctggagtgcagtggtgcgatctcggctcactgcaatctctgcctcccaggttcaagcaattctcatgcctcagcctcccgagtagctgggattacaggcaagcatcaccaagcctggctaatttttttgtttttagtagagacagggtttcaccgtgttggccaggctggtctcgaactcctgacctcatgatctgcctgccttggcctccaaaagtgctgggattacgggcatgagccactgtgtgctgcctacagatctatctcgggccaggaaacagtcacttctctgtgggagtggccctcacagaggcccacacaggctccaggagcttttccctttgttcccactctgagtgtcagctcaggtacaagagaaagagactcacgtcaggtggatgtgagatccacttggcttggaagccctaccccacaagagcccatagctcttgtaacattgtcttaggttccagatgccctcaagggacatacccaattatatgagtcactgctctctgacaagcccaaagcttgggtttcccaccattgaaccccctgtctcmatgcaatttatcaatgagaggccacaattacataagcaattttgcctactattacagctgacatgccatctttatcagatttccatgggaacagagctagaaagctaatccatggtcaaatgtgtccaaraaggagaaagggttttgttacccttgtaccctgaaatgcatactggattttgtggaggatttagttgtttrggtaagaagtaagtaaaaacgaaggtgaaaaacatgatagaatgtgtgattgttttcttcattgagaaagaaaaccgtagcatcgtgtaggccaggacatccctcagggtgccttcctcccttagcgagcccgagtctgtgtagagatgatagaatgtgtcgttgttttcttcattgagaaagaaaaccgtagcatcgtgtrggccaggacatccctcagggtgccttcctcccttagcgagcccgagtctgtgtagagatgatagaatgtgtcgttgttttcttcattgagaaagaaaaccgtagcatcgtgtaggccaggacatccctcagggtgccttcctcccttagcgagcccgagtctgtgtagagatgatagaatgtgtcgttgttttcttcattgagaaagaaaaccgtagcatcgtgtaggccaggacatccctcagggtgccttcctcccttagcgagcccgagtctgtgtagagatgatagaatgtgtcgttgttttcttcattgagaaagaaaaccgtagcatcrtgtaggccaggacatccctcagggtgccttcctcccttagcaagcccgagtctgtgtagagcaccccctgggtgagcctggtttgctgagcagagaagcctgtccaccttgatagcagtgagcctcagtccaccgttctgctgaagaggattttccagcctgcccttctgcttaataaaaccattttgatgggaatcttccaaaattacgttaaactctaccttcttaaatggagtgacttcaacaggcacttcttttttccaagtttcagaggtgtcctgcagcccccctatctgggagggtggtttatgggtatcccgagtagtgtggcttcccagggctatgatttctttttaatggaaamttataagtgttggtgaggatatagagagactgaaagcctcatacattgctgatgggagggaaaaatgatgcagcctctgatgattcctcaacaaattaaacatatgattaagataagacccagcaattccactcctagttctatactcaaagcaagtactcaaataggtacttgtacatgaatattcatagcaacactattcacaacagtcaaaaggtggaaataactcaaatgttcatcaacagggaaatggataaacaaaatgtgataaatatatgtaatagaatattattcagccatgaaaaaggaatgaagtactgacacatactcaaaaatatttttttttgartgaacctcaaaaatattatgctgagtgaaagaagccacatattgtatgattctgtttatatgaaatatctagaatagataaatccacagagacagcaaattgtgtggtgccattagagggagggatggggactgacagccaaaaggtacggggttttcttttgggcaaataaaaattttggaactagaggtggtgattacatgacattttgaatgttctgtactaaatactacctaattgtacacttaatggttaattttatctttttgtaatttcactgtaatttttaaaaaatctgggccaggcatggtggctcacacgtgtaatcccagcactttgggaggccaaggtgggcagatcacttgaggtcaggagtttgagaccagcctgggcaacatggtgaarccctgtctcwactaaaaatgcaaaaattagcagggcatggtgatacacgtttgtggtcccagttactcagggggctgaggcacaagaatcacttgaacccgggaggtggaggttgcagtgagccaggatcaygccattgcactctagcctggragacagagcaagactctgtctcaaaaacattcgtttccacaggccttctccagattttgtttttatatgtaatcaaattcttttggtttgacttttgaccctcccctaggtgtctgttgagatctatactaattaagagtccggtgacatggaaggtagaatcaggaaggcaataagctttctccaggaagacaggaagagccacgtcaagccccgggagtggcagctgcagttcagccctccagggctacctgagcaagcccttggcgagccaccccacccsctaagtacaaaagcagtcacacagctaaagtgggcttcttcttagggaaagatcctgctgctgtgaaaagttagatttccttcatttcactaatcatgatttctttatattacttttttctagttacaaaactcatgttctttgctaaaagcttagaaaatatctaaaaatatgaagaaaattaaaaatcactcaaaatatcaccacccagggacaacccagatataacataaccactgttaacatttgggtgtagaacataacccagcctgaatcaccccgatgctgctcccccgggggtgtgctggtaagccagctctgtgaaggaaaagtcctggtctggaatatttgctgagttctgggaagcaaatactcccaccacagctaatgtcaaggtgctgacctgaggccactggacatggggttgggaagatgtgcccttcctcccaccacagctgccctcagccrtacccccgtctcccccaacaactgccccatcttagctacccactcagagccagtgtggggtctctctgtccctcatccccacatacccacgttctgtcaattctgccttcaaagtgtccttcgtctgttggctacttccattcactctgccgccatctttaatccgatcatgttatcccatctacaaagtccttccagattctcctccactcctgccccatccaacccatcacaaccagtgaggtcttaaaatacacattttatggtgccacattccaataaacgtcacctcccaagagaggcctttcttgacaaccctttctccaaacctggttggtttcctaaacagcacttaaaaataaggtatttgataacttttttttttttttttttttttttgagatggagtcttgctctgtcaccaggctggagtgcagtggcacgatcttgtctgactgcaacctccacctcctggcttcaagtgattctcctgcctcagcctcccgagtagctgggactacaggtgtgcagcaccacgcccaactaatttttgtatttttactagagacggggtttcaccgtgttagccaggatggtctcatctcctgacctcatgatccgcccgcctcggcctcccaaagtgctgggattacaggcgtgagccaccgcgcgcggccgataacattttttttttcttgagacggagtcttgctctgtcgcccagattggagtgtggtgacacgatctcggctcactgcaagctcagcctcccgggttcatgccattctcctgcctcagcctcctgagtagctgcgactacaggcgcccgctgccacgcccagctaattttttgtatttttagttgagatggcgtttcaccgtgttagccaggatggtctcaatctcctgacctcgtgatccgcccgcctcggcctcccaaagtgctgggattacaggcgtgagccactgcgcccggcaaactttctttcttttgagacagagtcttgttctgtcgcccaggctctagtgcastggcgcgatctcggctcattgcaacctttaccgcccccatcccccgccaggttcaagtgattctcctgcctcagccttctgagtagctggaactataggtgcgcaccaccacgcccaactaatatttgtatttttagtagagatgggttttccccatgttgcccaggctggtctcaaacttctgggctcaagtgatccagcagccttggccttccaaagtgctgggattacaggcctgagccaccacaaccggccagaagttacatttttttttttttttttttcagagacatggtcttgctctgttgcccagagcaagaactatatattccatatattatcatatatttgacaaaattgggatcatactatgtataaagttttgtaatctacttttaaattttatattttactgtatgttttactacatatccttattttttttaaagaatttgatttttttaatacctgcataatacttccaagataggctgtgctatgactcattgaatcagtttcctgataatggacatttggactcttttgggatttcttctgctataatgactttttgttttgtttccaattatgtaatctaaaggcttttcttctaattcttacagtaagagcccagtggatgtcttgcagatatttagagttggcagagtgaatgaaaccacagagtttttgagcaaacctggcaatgtgaggcccttgttgcatggttctcctgtatgaaacatcgtgggaatcttgtgtcggtaagagtagccatctttatttttcaaaaatttcagcctcacaaatgtgaagtgttttactttttttttcctacttttttctatattacatgggtcttttcagttaaaatcagctagcttactgcattctggagaaaattacacagtttataattaagtgtgtaatttaaattacatatttatggctgggcagggtgggtcacacctgtaatcctagcactttgggaggctgaggcaaaaggatcacctgaggccaggggttcaagaccagcctggaaaacctagcaagacctcatctgtattttgaaaaattatgtatctattatttttaaaatttagcaaataggtatgaattgcttcttgaagactgtatcacatgaagaaaagtgattctatattcatgagtcttccatgtgtatctaatctagggatagcccaatatttaaagagaagagtccagaaattagagtgcacaccagacaacacgagttgtttatttgaaacataactctaagattctgtttgctttgaattactacttaatattaggactgaaactgaagtcacaggagcaggagaaaatactattaaatgtagatccattaattaagtacttagaagaaaagtaaaaagaaacatacaagattcacctgggggaaaaaaaaaaaaaccaataaactgctactgagggacccaaaagacaacttgcatgaatcagaaggatgccagtttttcctggattagtctatagatttagtgcaatcatgataaaattaccaataagatttttttaaagaagtgaaaagctgattctacaacacatactttttttaattttgaaattaccagaataattctggaaaagaagcgtaatgagggtgacattaatattaaacagcaattaactcaaaaacacagaagatttaggatatgatacaagcagatctttgtggaagaaagacaagttcttcaatactatctatagagataaacgggtaaccgcaaggaaaaaatataaagttggacccttacctcatttctcatacttaaactccagatagagcaaatatttaaatatttaaattcaaaccataaaagtatactaaatgaaaaatgggagaatctttttaaaataatctttaagtagggatgagctttctaagtaggaccaaaacccaaaagctattttacaaaattcattagatctcctaatacgaaattcaaacagtaggtgtttatagaataaaaggcaggggccgggagcggtggctcatgcctgtattcccagcactttgggaggctgaggcaggtggatcatgaggccaggagatcgagaccatcctgactaacacggtgaaaccgcgtctctactaaaaatacaaaaaattagacgggtgtggtggcacatgcctatagtcccagctactcgggaggctgaggcaggagaatggcgtgaacccgggaggcggagcttgcagtgagctgagatggtgccactgcactccagcctgagcaacagagcgagactccatctcaaaaaaaaaaaaaaaaaggcagaaatctccctttacttgtgttccgagaaacaaccatggcttcaccctgattgcagagttctctgaatgccagaagttcagtaggaacctgccaaagttctgagcgagggagaaatgcagtcagtgttgggcttacaccttatcctgcccttctcttttcagagggttgcttttacccaaagtagtggaagatcgtggtgtgcaaagaacagacgtcggaaaccttggaagtgggatttatttcagtgatttgctcaggtatgttcgatccttaatcacagaatcattactgagtacttgctatgtgttttcttctgtctttccttggtgagggagtttctcaaccaaaacacagatttatctattatatatgacctcaatatgcctggaatactatttcatmttcaacatccttgataatatttaaatctgcccttgggccagacatggtggcttatgcctgtaatcccagctctttgggatgccagggcaggaggatcacttgagcccaggagtttaagaccagtctaggcaacatagcaagaccccatctctayaaaaaattttaaaaattagctgtgcatggtggcgctaatagaacccatagttccagctactagggaggctgaggcaggaggatcacttgagtccaggaattcaaggctggagtgagctatgattatgccactgcagtccagagtgggcaacacagtgagaagaaccccatgtacatcatctgccaacctcataattggtattgcgacatcattttatgcaaggaaacagactcagggaggtcagggaacttgcctgaggttgcagagctaattaaaggatagagactgagttcaggcccaggacaaagtataatgatccaagatatttaaagagttcctacaaatcaataaggaaaagataagcaactctataagcagatgtgcaaaagacttgaatagaaacccaatagcaaagaaaatgacctgggaccaggcgcagtggctcatgcctgtaatcccagcactttgggaggccaaggcaggtagatcacttgaggccaggagttcgagaccatcctggccaatgtgatgaaacccgatctctactaaaaatacaaaaattagctgtgcrtggtggtatgcacctgtagtcccagctactcaggagtttgaggcagagagatttctcaagtccaggagtttgagattagcctgggcaacacagcaaggccctatgtctaaaaaaactttttaaaattagccaggcattgtgtcatacatctgtaatccaagctactcaggaggctgaggcaggaggattgcttgagcccagcagtccaaggccacagtgaggtatgactgaaccactacatccagcttgggagacaaagcgagacccaatctttaaaaaaaaaaaagaaagaaagaaaagaaaaaagaaaaaaagagagagcactgtaataacagaacactggaaatcatgcagatgtccatggacagtggaatggatccgtacattttggtggagtcctacatgaagtcccatcctgaagtttaaacaagtggactgtggctacacatgtcaaatggatgagccttaggaccttagtggagcaaaagttactagatgattctatatacaggcataccttggagatattgagggtttgattccacactactgcaataaagcaaatattgcaataaagtaagtcacacacatttttggtttcccaatgagtataaaaggtttacactctagtctattaagtgtgcaatagcattgtttttttaagaaatgtacataccttaattttaacatactatattactaaaaatgctaatcatctgagccttcagtgagccattgtctttttgctggtggaaggtcaagacctcaatgttgatggctgctgactgatgagggtggtggttgctgaaagctgaggtggccgtggcaatttcttaaaataagacaagaatgaagttcacctcagcaattgactcttcctttcatgaaagatttatctgtagtatgagatgctatttgataccatttacctgcagtagaacttccttgaaaattggagtcaattatctcaaacactgctgctgctttatccactaagtttatgtaatattcaaaatcctttgttgtcagttcaacaatgttcacaacatcttcaccaggaatggattccatctcaagaaaccactttcttcactcattcataagaagcaactcctcattcattcaagtttgatcatgagattgcagcaattcggtcccattttcaggctccaattctaattctagttctcctgctgcttctgccacatctacagtgacttcctccactgaagtttgaacccctcaaagtcacccaagatagaataaacttcttccaaaccccttttaatactgatatgctgacttgctcccataactcatcaaatrgtcttaagggcaaggagaatagcgaatcctttctggaaggttttcaatttactttgttcagatccatcagaggaatcactgtctaaggcagctatagccttacaaaatgtattttttttttttttagagttggggacttgctccattattgcccaggtgagagtacagtaagatgcaaccatagctccctggaacctcaaactgctggactcaagtgatcatcccacctcagactcctgggattacaggcatacctggccaaaatatatttctttctttctttttttttttttttgaggtggagtttgctcttgttgcccaggctggagtgcaatggcgtgatcatggctcactgcaacctccgcctcctggattcaagcgattcttctgtctcagcctcctgagtagctgagattacaggtgcatgccaccacgcctggctaatttttgtacttttagtagagatggggtttcatcatattggtcaggctggtctcaaactcctgacctcaggtgatctgccctccttggccttccaaagtgctgggatgacaggcatgagccaccgcacccagcccaaaatgcatttcttaaataataagacttgaaagctgaaattactccttgatccatggctgcagaatggaagttgtgttagcaggcgtgaaaacaacaaactccttgtacctctccatcagagctcctggatggctaggcgctttgccagtgagcagtcatattttgaaaggaaccttttttgtttagcaatagatctctacactgggcgtaaaattcagtaaaccattctgtaaacagatgtgctgtcatccaggttttgttgttccatttatagagcacagaaagagtagatttagcacaattctttagggctctaggatttttggaatggtaagtgagtactggcttcagcttatagtcaccagctgcattaccccctgacaagagtcagcctgtcrtctggaactttgaagctagccattgactcctctccagctgtggaagtcctagatggcattttcttccaatagaaggctgttatgtctacatggaaagtctgttgtttagtgaagccacctgcatcaatgatcttagctagatcttctggataatttgctgcagcttctacatcagcactggctggttcaccttccattgttatgttatggagatggcttctttccttaaacctcacccaacctctgccagcttcaacccttccttctgcagtttcctcacctctctgagccttcatagaattgaacagagttggggccttgctctggattagactttggcttaagagaatgctgtggctggtttgatcttctatccagactattaaaattttcttcatatcagcaataaggctgttttgctttcttatcattcgtatgttcactggagcagcacttttaatttccttcaagaattgtttctttacattcaccacttggagaactgtttgttgtaagaggcctagctttcagcctgccttggttttcaacatgccttcctcaccaagcttaatcatttctagcttttgatttaaagtgaaagatgtacaactctttctttcacttgaacacttagaggccactgtagggttattaactggcctaatttcagtattgctgtatctcaggaaatagggaggccagagaagaaggagggagatgagggaaccactggtcagtggagtagtcagaacacacataacatctaccaagcccaccaccttatatgggcacagttcattgcacccaaaacaattgcaacagtaacatcacagatcattgatcacacactgccattacagctataataaaaatgaaaaggtttgaaacattgtgagaattaccaaaatgagacacagagacacaaaggaagcacatgctgttaaaaaaaaaaatggcaccagtagacctgctcaacacagagttgccacaaaccttcaatctgtaaaaaaaaaaaaaaaaaaagcaatatctgcaaagtgcaataaaacgaggtatacctgtatgtgcaaggctcaaaaacaagcaaaagtatacattacattgttgagggacatatatctgtgcattaatactatgaaagaaaataggccaggcacagtggctcaagccagtaatcctaaccctttggaagaccaaggtggatgaaattgcttgaggccaagagttcaagaccagcctgggcaacatagtgagaccccatagctacaaaaatgtttttttttcgagacagagtctcactctgtcgcccgggctggagtgcagtggcacgatctcggcttactgcaatctcctcctgcggggttcacgccattctcctgcctcagcctccctagtagctgggactacaggtgcctgccaccacgcccggctaatttttttgtatttttagtagagacagggtttcaccgtgttaaccaggatggtctygatctcctgacctcgtgatccacccgtctcggcctcccaaagtgctgggattacaggcatgagccactgctcccagccgctacaaaattgtttttaaaaattagccaggcacagtggtgcacacctgtagtcccagcctcaggagactgaggtgggaggattgcttgaagccaggaggttgaggctgcagagagctatgattgcaccactgcactccagcttggatgaaagagtgcaagaccctgtctcaaacacacacacacacacacacaaaagagaaaactgttataaaaagggggacacagtaaaacctctcccacctacccagggtctcctctgtggctccttatgraataaattccacatgggaaaaaagagaaaataacacacacaaaaatcaagacagtgatcaaattacctctgggtgggagagaaggtgagctgtggggcagcatagaagttttagggatgttctagytcttaagctaagtggtagctatgtggatatttatcttattattctgtaaatatgtatatcataaatgttttttcctatgcacaatatatcaaagtaaaaatttttagatgtgaattgagccaaatagcagtggattaaggagtaaatgagccagaagagacggtcactggccccctctgccagaacgtggtgagataggaagcaacagagagagctccagggagaagtccagggtggggcttaatgaaaaggaaggaagcatgcttgtaagttgcaggaaaagagccttccaaaggggagagskttatagaaggaatggggggactgatttttttttttttttttagtkggggaaacaaagaagggtcgtctggccatacttctgcattttgaacttaatctttaaaaaataaggccgggtgcggtggtttacgcctgtaatcccagaactttgggaggccgagacgggcagatcacgaggtcaggcgatcgagaccatcctggctaacacagtgaaacccggtctctactaaaaatacaaaaaattagccgggcgtggtggcgggcgcctgtagtcccagctactccggaggctgaggcagaagaatggtgtgaacccgggaggtggggcttgcagtgagcggagatagcgccactgcagtctggcctgggggaaagagcgagactccstctcaaaaaaaaaaaaaaaagaaaagaaaaaaaataggccgggcgcggtggctcacgcttgtaatcccagcactttgggaggccgaggcaggccgatcacgaggtcaggagataagagaccatcctggctaacaccgtgaaaccgcgtctctactaaaaatacaaaaaaattagccgggcgtggtggcgggcgcctgcagtcccagctgctggggaggctgaggcaggagaatggcgtgaacccgggaggcggagcttgcagtaagccgaaatccgccacagcactccagcctgggcgacagagggagactctgtttctaaaaaaaaaaaaaaaaaaaaatagagatgcgtctctaaaatgttgtcccgtgtccaagtgttctcattgttcaattcccacctatgtaacaaacctgcacgttgtgcacatgtaccctagaacttaaagtataataaaaaaataaaatgttgtccccaaaggtgtgtcctagcctgtgctcctaatagcaagagttgccttattaaagctgctgattccccaagaaagataaaacaacatttctcatttggatatcatttgaaatgtttgtttttccactcagraggctttgtgagagcttgtctttccctttgaccggttcttactcacttggtacccacagttcttactcctttccgagctttagtgcagagaattaaatctactttttcctaattaataaggcggtgatttttccttctacttaccaccccggtatttatgacagcaaagtgtgtatattttagtagctaaaaaagatttaggagaacagtagaattcatttccgtctggaaacaaagtgttttgagcactgcctagcacaacataagggcaatatacatatttgtcacgtagaaatgcgaaataggccaggcatggttgctcatgcctgtaatcctagcactttgggaggctgaggagggaggatcacttgagcccgggagtttgagaccagcctgggaaacatagtgagaccccatctttgcaaaaaaytttaaaagttagctaggtgtggtgcacacctgtagtcccagctactcaggaggctgaggcaggaggatcacttaagcccaggagttcgagactgcaatgagctatgatcgtgccactgcactctagcctgggtaacagagcaagattctgtcttaaaaaaagaagaagaaatattaaataaataagtgcataataaagttctaaattgagtctttggagatatttcaataataggaaaatttagaacagtttaccaggaaagtcttttcaatagtatgttattgacaagtcactctaagctataaatatgtgtttatttccttttgcatgtaktacaagtatcaagtactcacamcygggagagacagatggcaccagactcctgctcatttgtgacgtagccctcrgaaagtgtatggacttacacgagaagaacttttccttgactgaagcaccaccaggctacgacagtgtgcatggagtttcacaaacagcctctgtcaccacagacttagaggtatttttatatcaaggaacaagcaaagagggtcttgaatgctcaaagaagagcctcagttttttgctcctattttcattaaatatrcttaagtttaaataattgttaaatatttactgcatgaattcaacattttctaaattagcaaacatgattttatgaaaacatctgcccatacaggttttttgttgctattgttgttaatcacctactgatttctatttgctctagaatgatgaatttgttgtctataaaaccaatcaggttaaaatgaaatatattattaaatttcccatgcctggagatcaaataaaggactttcatcctagtgatcmtactgaattagaggaatacagacctgagttttcaaatttttcaaaggatgaaggtaggacaattttcttgaatgcggttttatgttattatatttatagacctcaaatgttatattttcaatggagtgtatatttgcatttattttatctatgacctcattcataagtatttcatttcttttcaatctcagaattgtttcccacaaatttctctcaatgttaacatcagtcaaacccctctgcctaatatcaaaatagagcacttaattttaaaaaaaaaaatatatatatatatatatattttttttttttttttttttgagrcagggtctcactctgtcccccaggctgsagtacaatgtgtgatcaaagtgcactgcagcctcaaactcctgggttcaaatgatcctcctgactcaacctcccaagtagctaggactaccatccgtgaccttttttttttttttttttttgaaacggagtctcgctytgtcgcccaggctggactacagtggcgcsatctcggctcactgcaagctccgcctccrgggttcacgccattctcctgccttagcctcccaagtagctgggactacaggcacccrccaccgcaccyggctaattttttgtatttttagtagagacgggatttcactgtgttagccaggakggtctcaatctcctgacctcatgaaccgcccgcctcagcctcccaaagtgctgagattacaggcatgagccacggtgccctgccaacattttttaatttgttttttttttttwagagacgagatctcactaygttgcccaggctggtctgaaattcctggcctcaagcgatcctcctgccttggtatcccaaagtgctgggattacrgatgtgagccaccatggccagcctcatttccttttttatcttgcatacataaaaaccaggatgcttgagaaaggttaagcgatctcaaaattccatgtgacttcattaacacactgaagttgagcttattcccttcaggaatagccaaggctaaaaacctgtggaaccttgctaagatgtcatggtgcagaaagtgtaatgggatggagagaaccgacagcagagccgctgtagagccaggaagcccagggtttgagtgttgccctgccaccctgcagtcttgaaactgcataccttttgcgctccaccttctctccgatgggaatgagagaaattgaaggcactgagtaaattgccatgtgtggtgcgtgtgttagccatagtaatgcgagcatacaasagtatattcacttctcagagtatcatgagcccaaacaattacagtattaattagtaggactgtaagaacacattaacatttttgaccgtgctcaaattattttttgtcagaaatgcatgaggtcatgtgtgttcagaggtgactccaattttttctctgggtgtcattaagtgaaatatctggcaagatgatatgtatttatatttcctaaccttatctgtattctgtatgtttgtaccacttacaataggatgtgaacatttttcagtatgctgccataggagccttggattgaaaatctacgttgtttgatgccatcccaaaatgcttgggtggcaccataaataatagtgaccgagcccttccacactacaagccagggaatgcagacacctggattcaggcttcagccacccttgagacagtctgaagacttctgtgtatttgtgtgtatatttaaatatatgtcaagtaatgctatgttttcaagaggacaccccacagtctgtacattaaaaaagcagaagagcacatgcctgtagtcccagctactcaagaggctgaggcaggaggattacttgagcacaggagttcaaaaccagcctgggcaacatagtgagactcccatctctaccaaaaagaagaaaagaagaacaaaaatttaagcagaagggtctttaaaaaaaaaaaaaggcaggccaggcatggtggctcacacccatagtcccagcactttgggaagtcaaggcaggtggatcctttgagtccaggagttcaagaccagcctgggcaacatggctaaacctcatctctacaaaaaaataccaaaaaattagctaggcatggtggtgcatgcctgtagtcccagctactcaggaggctgagatgggaggatcacccgagcaagagaggatgagtctaccatgagcagagattgtgccactgcactcccacctgggtaacagagtgagatgctgtctcaaaaaaaaaggcatctcccatttttctcatgtgggttcacttgcttttcaaaattggctattgaaaatcataaaatgctgtttatccattttccctaaaataaaatgcatgaaggcatggagaaggaataaagatcaagataacaaaaatagacagggatggttttgaaagctaatggtaacatttttaacatttagattaccagttaccagatgccaaaacttccagcagcaccaaggccagcctccaggatgcctctgggaacttggttcctctggaggatgtccacatcraggagaatcatagacactgtagcccaggtatgttgtctgtggctttatgacacttaaactacatggatgtaaaccatacatgagaatttgattgcagttgcctgaactgaagggaatagatrgatttctaaaatgtatttattcaagagatattcactgagcactccatgccagggactagctaggctctgggcatccagcagtgcacaacacaaaagctctgcccttgtggagcacacactgtgtgggggaataggcaataaacatgatgaaagagtgaaacacataacatgttagatggtgacaggtgctaaagagaaaaatgaaagcaggaggggatagaagctgtgaaagacrggggctttgaacctgtaaacagaatggccacggaggcctccctgagaaggtgacatctgcatacagacctgaaggaaatgggggctaaactgtgtggacatcgggggatgcttattccaggcagcgggaacatcacatgccaaggctcagaggtagaaaggaggctgatctggcccaggcgcgccaaggagatgcactgtggctgcagtggggtggaaaggggagagtgcatggggactgagtcagagaggtgaggggctctcacatcagcacacaggtcatgctgtccttgactctgagtgaaatggaagcttctagatgtttggcagaggaatgacatgaacagacctgttttaaccggctcactctggccaccatgttgggaacagtaggaagaggcccagtgggagaaatgttaggtcaagttccctagaaagcagactctggatggaatttgttttcaggaagcctgtgggactgtgcctgcgggagccgcacctgtgagggagtgagggaggcaggacgtggccgaggagacaacagagtcctcagatgatcttgggggaagctctgggccagagtggtccttgagagaaggtctgaatcaaggcaagggggccgggctttgtagccccactggggccagtcctgggatgtgggctgctccrgggaggggtcagaaccttggctaaggcagtttgtctttggctgaggayggttcctggggaggcgccccacaggtgacactcctagcagtctcagtactgaaggkgacacagcrggcccaacgtcacatcacatagaggagacrattgacrattcagttaagggacctggtgatgtggagaagaakgtttgcagtgggggtataggaagtgatggagtctgccaaggcctgagggcagagccaatcagatttgctggtggggacgggacaggatgacagcaggatgtttgccctgaataactagaaggatcatgtttgcatttactagaatgggcaaagtcacaggagggcaggttrggggccatcaggagtttatctttggccacgtaggtcttgyggctacatagggccagggaggagacccaagccggacttataagtggggagtcagcagcattcagatagtgtttaaagtcatgagcccagattaaacacccagagaatcaatagagcacagaagccaacatggggatgtaggggaggaggctgagtcagccacggagaccaagagggagcggctgtagaaacacacgaggacagctgracagggagggcaggaaaggctgctggtggtctcatgaataatgaccagccctaaccattggatttagcaatgagattgttggtgacctttgccttttgatggtgttgtgggggtgaaaggctgatcagagtgagttcaagagagaatgggaggaagaatggggagacagaggagaggatgagacagcagctgaagagaagtggggttgtgttttctttctccttttaagrtgcaagaaacaacagcatrtgtgggagtcagcgcaggagggaaamctggcgacctgggagaggggaattgctggagctacttccttctcyacacccttctctatgttttattgcataaataggaaayattgttgaaaagactttcckggtaaactgttctgaattttacktttatcaaaaagactcaatttagaactttmttatgcccttatttatttaacatttctwtgtaacaaacatgtatattgcccttatgttgtgccaggcagtgctcaaagcactttcttcccagagagagatgaattctactgttctcccaaatctttgttagctwctaaaatatacacattttgctatcataaataccagggtggtggctgggtacggtggttcatgcctgtaatcccaggactttggaggggaggcsraggcaggaggattgcttgagctcaggagttccagaccagcctggggaacatggagaaaccccatctctacaaaaattggctgagcgcagtggcgtgcacctgtagtcccatctacttgggaggttgagatgggaggatggcttgccattactagaatgggcaaagtcacaggagggcaggttggaggaggcagaggttgcaatgagccaagaccgcaccactgcactccaacctgggtgatagagcgagaccctgtctcaaaaaaaaaaaaaaaaaaaaaaaactcagggtgttgaaagagaaggagaaaaccccaccttattaaattatctgcactgaagctcagaaagagcattaaataccaagtgagtaagaactggtcaaagcgaaagacaagcatcacaggagggttatctaatgcgggtgctggggctgcagccaggagctcgcagcaggttcatcatccacagtcacaggatggaaggcagcttttcaggggtgccaagtggccagatgcagtggtaagagcttggaaagttaagtttttggttttctaaaattgaattggtttgctaagatttggcctcatgatcagcttctgactctgaagattgcattgaacaaccataaaggcctttkaggagattaagaaygttcaagtacagtgccatgatgttctgatccctgtagaggraaattagytccatttcagtgatcaccttaatctggggakaygsggtgttgggtgagaagagcagtttggatatagctgacctccacccctgggcccactctgacccatacrcacatcttcaaggcagctcagagcaacagcatacactttgaaagacccagctgtgggctcatgggacatgttccatttccgccaatccytttggcaccacttaggatctgtaaacataatggttaccatttcytaagagtcaggccctcagccgagttttccacatgcagtacttaattctctcagactcagatcattctgattccagcgtccagrttcttaaccagtacaccatagtgcagcatggtagatcatacaaagcaaaggatccggagtttgtaaggcttagctttgaattcttgcttattctttctagtgctgtgagtttgggaaagttacttaactcctttgcctcgttttcctcatgtgtaaaatggaaataataatatctgcccatcagtgttgtggctattcratctaataaatataaagaacttagggattgtccttacgtgcaaaacaaattatgacgaggttacagggagaggcgtgtgtcctccatgccttacttggtattagacgacttgtaccgtttgatatttcaaacccaaagaggcctgttccctggggaagtttgccccaaaataactttcgatttagcagtgaatttctcactcattttatgatgaaacagccggactgtagaccgagcttgagtatccaagcagaggctggggtgtagattcttatatgtgcatggctgatacattttgacccttcttggaagagattaatgatgttaagcttagttacwtcatggttttatctaatggaagaaaattaagatgtcaaaatttgttacattatattagtttctgttctaaggcctggtaaaaatacttttattatagtctaaaattattgacctttgtgagtgcccagccacacagtgtgatatgcaaagagagtgcagctgacacaggcctgatgtctggcctcctggggactcctgtgcaaaggcaggcctgctaaatagaacaggcaggaaggctactgagtaggaagaaacattagtctataccaagtacaattagatagtggtcctgatcatcaaactcagggcaagcatacatgcctttaagggtttcgtaaaactgaggaaatccaagagaggatgagaaggagttccgtgcacagtcaaggggacagtgtctgacgtccycccagtcagtactaggtgggccccagtcctggtgtctcccagccaggcacactctaaccattcattgcaggcagcgtagcccagattgctgagaaactccaggacgcacctttgmctcatcttgggtggctggccagaccgggattccaggaatcctacccactggctagcgaggtattcatttgcaggatgccaagagattctgtctccaggacggtgctgacctgctgatttggggagactcaaattgcttatattaacaaggactccatgaaaaattttccctggcaccctacacaccctaggggcagccaagcttgcagcaaatccaggtgtagacaatgttttcaaataagttagatttttttttwaatttttcattttggtctcttccccrgattattgattacagatcattaaatatttttgccttattattgtcacatgttagaatcttactgtttattatatgtctgggggkttttttcttaattttcaaacatttaaagcctcctgccttttcctgagtgagggagtgatgaaaacagtctgttggaaacattaattagataatagagacaacagagagtagtggagaagacttgattctggaagaaccaacgcacacagagatgaggagctagatgagggctgggtagagagaggggraaagccacagaggggtccccaggaggaaaggccaagtcctgagagcygataggatagaaggactattctggaatcgtttccagccaacatggcacgaaggaggcatcaaagcccacaamaygaaaggggcgattttccagccgtcttaacaacagctatattgcctctgctaagtcagtgttggtaagacttcaggtggcttctattccagttggacatgaatgaaccacctaaccgtgggactggggcattttatcacatgacactagctctccattgcaaaagtgaagccagggttgggaatttgaggggcatgatacaaattcaaggaaattcaaataaatatgcaaaatcattttcgttcgtccttgttcctgcaaatgtaatccatgtggtctcatcaattgtatggattttttctcttcttcaggtcattgtatttcagacatacacaaataaaagtcatgtgcccattgaggcaaaatatatctttcctttggatgacaaggccgctgtgtgtggcttcgaagccttcatcagtgggaagcacatagttggagaggtaaggcgagaagatgcatcgtgcccgctctcggctttcaaagtcagcttccatttcccagaacctttgttttcggagtccccatggctataaggttgagtagcagccttatcataaaacgagaatattctttgaagaaccagttcttgcacagtgagccttcctcaaatatccctccctgatgaagggtttctatccctatctatccagtcttcatgatcagtgtcttgcacattctttcccttggcactgtaagagtgatttcagtatgaaaagtttaaaagggccgggtgtggtggctcatgcctataatcccagcacttcgggaggctgaggcaggcagatcactcgatgtcaggagttcgagaccagcctggccaacatagcaaaaccctatctctactaaaaatacaaaaattagccaggtgtggttgtgcacgcctgtaatcccagctacttgggaggctgaggcaggagaatctcttgaacctgggaggcggaggttgcagtgagccaagatcgcaccactgcactccagcctgggcaacagagtgacactccatctcagaaaaaaaataaaaagaaaagtttaagagaggcacattggaaaattggtgaagcccttatatakttttgtaaaacctgatccccggcatcctgctataaaagtcaagctgaaatgaaaactattgtaactttctaaaaaaaaagaaaaaagaaagaaaagaaacaacagtttattaattctttgtatattgtaaggattagaccacagttacaattataaacyayaatttactaaatttaaagtaattattattttttgttcaacataaactcccaaccaaaaaaaatttttttcactattgattctgaaatattttgatcccaactgaaagagacttctctttagttggcctttcctggttcaaattcttatcagataagtacatttcgatgatcactttatttaagtttccattcatcttagactcagtttttagkttttgcctgggttttaataaacattgatgttgttttcttcattaaagcctgaagtcactcttcatgtaaggaatgatttaaaaatcatcttttccagattaaagagaaggaagaagcccagcgagagtaccgaggagccgtgacccagggccatggcgcttacctgatgagtcaggatgctccggtaccgcttggtgtgcatgccgcgtgcatacaggagagggaaagagagttagaacaagatatgaaatacgaatttcatgctagaggctgagataatttacactgttgtaggcccagagttccacttgctctaagtaaggggaagccatgccagtcagacccatttgacttatctaaacaaaagaggaaacggcatcaatagttccagacaaacaggaagagctaggcctgtcattgggaactgagtttcccagaaggaatgacagacaaaaagataacatttgagatatgtaactttcatcttctgataagagtctgatatattggccgtgcacaatggctcacacctgtaatctcagcactttgggaggctgagacgggcggatcacctgaggtcaggaattcgagaccagcctggccaacatggtgaaaccccatctttactaaaagtacaaaaattagctgggcgtggtggcaggcacctgtaatcccagctactggagaggctgcagcaggagaatctcttgaactcggggggcacaggttgcagtgagccaaaattgcgccattgcactccagcctgggtgacaagagcgaaactccgtctcaaaaaaaaaaaaaaaaaaaagaagagtgtgatatatttacaatttccctggaagtaagctyacctagcagatggtccaaacataaagaagggaggcatttctgccaggtcttgtgcgggcccagctcctgtgcttttaggtgattagctttagcagggatgtgacctgcacagcgtggaagagggaacagctggcaggtccactggactactttccttaaatgtcaggtgttttcacgaggcctctggcaggtgctagattgcgtgtagtcagcgtctaactctagtgcagatattttagttgtttttgcagatggggccatatgtttgagtatcacctctgagggagacaaatggccatggtgttttgaaaatttaatgtttgctggggctaggggcacattcaagattaatatagatcgaagggktaaattattgctcttgacatctaagatatccacttgcaggatgggaataggcaatgaagaggtgattattgaacagttaacaatgctaactctatgtatggccaaactgtatgtatagaagcctggggttcattatcgggttatcctcctatgtgagttggtaaatgtttcctcctaaatacctacgtatttccctaggaatatggtccacaagaaaacagtcttcacaaaagatattacctatgggtaaagtctgatcagaactattgctaacccaagacttcaggtctctcagaatgtatttgacatcttgtgactataatgttctcatatcataatatatggtattcactttgggaggccaaagmaggaggatcacttcttcagcccaggaggttgtagtgagccatggtcaggccactgcactccagcctgagtgactgagcaagaccccatctttaaaaataaacaaaattttgaaaaaagkaargcatgtgatggagagtytgggtgtgcagygggggagcctgctccaagaagagactgtgccagttagcaccgcccatgcctggaggggctgggatccgttctgcttttctgtcragtttttgggatctttctaactgtttctccctcatcttccaagcatgtgtttgcaattataaactctagtaaagtgagcttcccaggggtagagaccatcaggcctcctccttggcgtgagtcctggtcctctgagagcctccctgaaggagmacaggaagactccagcctgcctcgctaacggacggaagctgtaactaccaataacccatgttagggatcttctagtcaatgttatgatcatcaccaattaatatggagggtaaagacaaatccagtctttatccataggttgaaaaacatcttggaaattgttttcataagctctttttctgaaaaataattgatgttttctttaatatttcaggaggaactcctctaagcaaggagttcttgatagttgtagaattattgtagagagaaaagtaatagggcacttgtcattaaatgtcagagatgctctttgctagagtgagagttgcttctttatgccttttgctatgttgatgtgtatcagatttcaaggggtagactttattcactctttgccagctctaggcctttgggatcagattcaggtaatattgttatttatggaaattaagttgatatctttgtcagcattctgataccttatagggttgtttttagagtcatctactccctccctcaggaattgaaagtcgagaatttcaacttttttctatttgaaggataagttagtcctctgatggatgggagcttaaattagccaaactttcagatgtttcctcccattatcactttctctgtttaacctcagctacacatgagtacattcttccccatgtcatgtctctcatgttgagttgtgagctttctcaacactgttaacaggtactgcaaaaatatttctccaatgtcttcaaaattaaaacatgtgaaatgcaatcagttctacagcaaatcgtcacatcctaaggattttgtcccagtgtggtgccggagtatttgaatattttaatgcaaaatccaagcatagatggagaaaacagatatgttttttaaacatctggttttatgtttacatgtggaaatctcacattcttccaaggctaagaaataggaatacctgtgtttccttgagtgagaggggagccgtaaagaggcaagagctgccgcaggtgtgagccctgcctcaggactgcaccagcgggaacacaggagttcatcatctggtcattctcccagctcatagtttgatttctgccttaaaaatcatggactgattttttaaaagtgaattattaaatatgttttgctgaaattaattttctttattataaaatttaccattttaaycttttttaagtgtacaatttagtgctgttagctacattcacaattctgtgcaaccatcaccatcttcaaactatttcatcagcccagagactatgtatccattaaacagtaactccacattccctcctacacccagcgcctgctaccacgattctacgttccgtctctatgactttgcctgttctgagtatctcatataagtggagtcataggacattgtccctttatgtctggcttatttcacttagcataatgtttttaatgtccatctatgttgaagcatgtgtcagaatttcccttctttttaaagctgaataatattccattgcatgaatggaccacattttgcttatccattcatctatcggtggacacttgggttgtttctgtcctttggctattgtgaataatgctgctatgagcattggtatacaagcgtctgtttgagtctgctttcaattctggatgtatgcgcagcgtgggattgctggatcatatgctcrttctatgtttagtttttttgggaattgccatgctgtcttccatagcagctgcatcattttacattcccagcaccagtgcaccaggattccagtttttccacatcctcaccaacactcatcattcyggttttttccatattgattgaaatcaatcagcttttctttggtttgttttggtttttgagacacagtgtcgctcggtcatctaggctggagtgcagtggtgcaatcatagctcaccacagcctcracttcctgagcccaagcaatcctcccacctcagcctccagagtagctggaactacaggtatatgccaccactttttttcctattgttttttatttgtctgtttggtttttgtttgctgttggtgttttttgagacagcgtatcactttgtcacccaggstggaatggagtagcgcaatcttggctcactgcagccctgacatccgggtctcaagccatcctcctgcctcagccctccaagtaggtgggactacaggcccacaccaccacacccagmtaattttttgtagagacagcatttcaccatggacccaggctggtctggaatcccaagctcaagcaatctgcctgccttggcctcccaaactgctgggattacaggcatgagccactctgcccagccaccacttgttttttaataacagccatcccactgggtgtgaaatgggatctcactgtggttctgatttgcacttccctaatgrctaatgacatcaagcatctttgcatgcacttgctggcttttgtgtatcttctttggagaaatatcaagtactggaatctactcataccaaggctgcatattaataattagctaaaggcataatttcaggatgctttgtaaatgtaaagggtatgatcatgctattatttaaaattctagctgggcgtggtggctcatgcctataaccccagcactttgggaggctgaggcgggtggatcacctgaggtcaggagttcaagaccagcytgggcaacayggtgaaaccccatctctactagaaatacaaaaattagccaggtgtggtggcacatgcctttagtcccagctacttgggaggctgaggcaggaaaatcacttgaacctgggagtcgggggaggttgcagtgagccaagattgcgccagtgcactacagcctaggtgacagagcaagactccatctcaaaatagaataaataaataaagtaaaataaaataaaattctgtttaaaatcttttcgggaaagtaccctgtagcaggagggagagaaaataccatagagttataaaattcccgaaggatagaacgtatactttattttaaatgtgaagtaactattttctggatggagcattgaaagagaaataattcctcttttataaatagacagaagaccaaatgagcaggctatgttctccgagttgccactctgtctccgtcaaatggcggcaactcaatccagatgcacccgaggccctgcaggccccagcccaggtgccgtccttgttttgcaatgatcgactccttgtctatggattcattcctcactgcacacaggtaagaaggcacagagtttgttattctatgggaagaccaatatattttgctaattttttttctgtcttcttccctccccttctcaccagcagattttcttcttctgggaacacagctggtggttagccagggctttggggaggcttctagtttttattgaaaggkgagaggaaatcaccaaaagaatttctgttaaaccaagacactgcagagtggaaaggctaatgaggaatttatttttttttcccatttcaggcaagtttgtgtgcactaatttaagagaaagaatttttgtacaatagtgtcgactattgagcttcagaagacaactgcaactttaagattcaaaacctaaactatcgacccattgtttgaaagttatgattttatatttccatatataatgctctatgtcaagcttgtccaacccacagcccagggcagctttgaatgcggcccaacacaaattcgtaaactttcttaaaacattacgaaaatttttygcaagttttttttcagctcatcagctatcattagttagtgtattttatgtgtcgcacaagacaattcttcttccattgtggcccagggaagccaaaagattggatcctctgctgtctgtacttcctttgttgctttcctgtgttgaaatttcattacacgatgtggagatgggccatctgtacmaatgagtatactttccttcggtttctaacgcagcacttcttcatctgaggtagttgggtctaggtgtgtctatatgggcatcagtgggaggcaatatctgcaattaaatatggcatttatgcttgcaaatttgtctagagaggttctcaaagatgttcatgactcaataaaagttacatgccattggggtgcgggccctgcgggacgggacgagggcggggcgccaaccgcgagcacccccgcctccccccgggctctgctggcctctgcgcgctggggccgcctctccttccgcaggggcagcggggtctcctggaagccccggagcctcatggaagcccgggagggcggcggagcggggcccgcagcgcggggcccggaggggcagccggcgcccgaagccagggtgcacttccgagtggcgaggttcatcatgsaggcaagtgtcaagctagggatgcggtccrttcccatygccactgcttgcaccatttaccataagttcttctgcgagaccagcctggacgcctgtgacccttacctgattgccatgtcttccatttacttggccggcaaagtggaagagcagcacctgcagactcgtgacatcatcartgtgtccaacaggtactttaacccaagcggtgagcccctggaattggactcccgcttctgggagctccgggacagcattgtgcagtgtcagcttctcatgctgagagttctgcgcttccaggtctccttccagcatccacacaagtacctgctccactacctgctttccctcragaastggctgaaccgccacagctggcagcggayccccgttgccgtcactgcctgggccctgctgcgggacagctaccacgggggtctgtgcctccgcttccaggaccagcacatcaccgtggcggtgctctacctggccctgcaggtctgcggagttgaggtgcccgctgaggtcgaggctgagaagccgtggtggcaggtgtttggtgacgaccttaccaatcattgataatattgtatctgatctcattcagatttataccacggacacagagatcccctaaggccctggcccaggtctgcccaaagagaagcccaggatggtcggctgcctggggacattgccaccacgtcgccacgatggctggtcctcagaggaccagctgrgaggactggttgtgctgctggagaaggrctggagaaggcgatagcatgctgccgctttgacagtccctagcagtcgcggtccagatgatggtgggagccgcgcctccagcggscaggccgggagtgcactgygtgcagctgatccaaggcagccacatctgcttttgtcctttgagaggactctgactacaatataggcatgacatcaatgaaaggaaaatcatgaaatcgatgagactgaatccctagggatttttttaaagccagatttatagcgagaatgaatgtgcaacgtggctgaaatctattttgtgtaataaaaggtgatgctagtcaaaaaaaaagttacatgccactggtctactgatgctacttagaaatattagttataaaagtactggactaagagtagatcatatcgtatattgaggatgtgggttttttccatgttttgattaaaagcaaatgaattatgaaagaaaaaaattcctgtctcccccatactcacagcatttctggtttccagatatgtgtttttcccaaccaattctctgacaccagttgcatgtcctacaatttaattcagttctgacactagctgcctgggtttggcacagacctcacaggrtgagggctcagtcccacaagactgttccccactccagacaccggtagcargtagcgggtccccaggttacccatacttctggtcagctccaagtcagtgttcccacaaccctttctcaggttcagtaayttcctgtaacagctcacagaactcaggaaaagtttgccttagtattactgatttattgcaaagaatattataaaggatacgaatgaacagccagatgaagaggtatatagggtaaggcccagaatagtcccaagcacaggagcttctgtctaacatacagttgggatgcaccatcctcctggcacatgaatgctgacccagaagctccctgaacccccttaggtggggtttttaatgcaggtttcattacaaaggcctggttgattaaatcattggccattggtgattaactctcccctctctggaggttggggagtggggttgaagttccagccctctaatcatatggttggttccccagcaaccagccctcattctagggactttctaaaagtcacctcattaacataaactcaggtgtggttgaagcrtcctgttaggaataacaaatacatacatttcttatgtctgtagggaagttcagactttccctctgaagtttccrkgtttggtctataaaataatccaacgatagattaacaggggaagagacatgcagatgtcgttacgtgtgcatgagccacatgagactcaaagaagggccagatgactgaagtttcatacmgtacagaggcgggtgggattgtggggctcctgggggaggtggggacaggttgtgggagggtgaggggaggaaacacgtggtgagcaaaggctttcttgtgatgcagatgaagtctggcaggcagcagccctgagagaatagaggcacctctggtaacagtttctctatcatccctttaaagtatcagacttcagcctcctcttcctgggagttcatckttcctaaatctggataaggcagataagggggtctcagagaaagcctgtttgcatctgctgtttccttcaccgacataggattcctctgcagatgcaaatattccctgcaaaaggactgcttttcagagctactcctatgtctgctgtccctctgaatagcatctcaaaatatgccgaagaagtatcttttggggtggcctattttacctttttacatatcacaatatcacaaattattaccaagaagcaacatttggactggtactgaatccactatagtttagcctatacatgctatttatgtagttttttttattcaaaggagtattagtataaccagataaatcatttcccagacattgctgggttttttctcaaaaatgtatagcttacttttcagcactaaatcrgtatcattgacttattagttgccagtgacttatgtatagaacttargctcaatattgctttaaaaattagatctttgtgggtactgataagggagaataaattaaaagtgtatttttaaaagttagatctaagggggaaagaaggtaaaataattttacctgggaagaggtcattttccatagagtcacagcaagttgtacttcctctgtgagaagcagccttatcaatgacaaaattacaagagttggaatgaaggagagttccatctctcagttgttggagaggaagcacctggtggtgcacattgtgcagtcttcacccttcagagtgcagaccatgttcacggacgggcatcccagggccaaggtggctcttcctatggtagaaaagaagttttcaattttttaaataaaatgaattgacaaaatggccttttatagaaaaagcaaaactctagggmcagaaaacagatgagctgccagagctggaggaagctacacaggggcacacaggaacctttcagggtaaagagaatgttctgtgtcttcacttcaacagtggtcacacaactgtatacatcccttaagactcatcaaactgtatatttaagaggagtgcattttactgtatgcaggttatacctccrtttttaaaatgatgttctttgcaagtcttgtattagaagccaagtgaatctttttttttcctttgctacttaaacacagatgatccacaagctggcaayccgagctctaatcggagattacgaagatggcattcttcacgaaaatgaaaccagtcatgaggtttgttcttttcattgtaaaaactattagayattcttcttgagcattcttacattgatttatctgtggaaatagaaagtgaggtcagctgcgtggagaaagagactgtggtgtcagggcattcatcactgtatctgtgacactgtgcctgggatgtggggygtgtggtaaatgtttgttgaatgaattaacaaaagagtggatgtcagtggtttctggaaaattctgtaatgttttacttatcagaaaaagcccaaggagggctcagagaacactcgctgagtgcctgtagtggacgtcacctcagatctctcgtgtggtagcgttagtattcccatcttactgatgagagtcctgagtgcgaaatgctgagtgacctgccaaagcccacctgactccccccatgctgtgcagaccasggcctcagcagaggggcccctcagccaggccaccaggactgcccagctgttctctsrgggatgagatcttcaacaaggctgtgagtgttagtcctcaatgccatcccacaagaaggtgacagcaggccctggagacccccacagtcagttctagtgacagatggtcacctggtggtctccctattctcctcagatgccgctgggttggcagcttctgtgtgctgttttgtttaagacccttttatcctgaacaagacattccatctttccaattcctcagctttaaattgggagccacagactgtgaaagaatgagaaagcccactgcccgggggagctctctgtgaactacagggagctgaataatgaagagtgacattttctatggctaaatcagttgatctcattttaaagggaatattgagccaccaatttagatgggacctacaattcaatatttagtctgaaatacgaatcttaaaatgatttactgacatagctaaatagaaataaaacaggacatgayttatgttttattctatcctagatgaaraaacaaaccttgaaatctctgattattaaactcagtaaagaaaactctctcataatacaatttacaagctttgtggcagttgagaaaagggtatatattattgttaattttaggttaaattattttatttatatttccacrttaagaaagtcacccttgctttgrtggttaatgacracacccacaccctgggcctgggaagcgtgggttgcagacaggccagyaggccccacragtcccaacctcccattcatggggggcttcggtgttgggacttagggtgatctttctaaatgagttgagtatgttatcatttttaatgttatwattattaataattagctaatgtgtattttttggatatactataattttgttacagttttggcatttattgtcttttwttaatccaagaccctcaaaaaatagaaaaggcctgggttccctgagagcccctttcccctacataagtttaaggggaaaattcacrtaacgtgcccagcacagtggccagcacctgccagtgctccgtaaagaggaaagycactccacctccccacttyccctcacgcttgtggcccayggcacaagctccagtcccacacaccagcgtatcccaaaccaacaccccataggctttagaatgtgtaatcatcatttaattggataacgtctatttgatttaatctatttgtgattcaatataggatgagaatgaatcgcctttccctgatattccaaaagtttctgaacttattgccaaagaagatgtagacttcctgccctacatgagctggcagggggagccccaagaagccgtcaggaaccaggtaaatgctgattaccaaataagttgatatcgtgctttcgtttgttcatgaagatgaagggaaccctttgctaaaatagctcccttcttacctgtacatgaagaagttgttgtatccctgatgatrgaaaatattcatgcatttataaaatgttgarttacatcatgttgcattacagagacttcacattgtatgaatggagctgtatagtacaaaaagagaacacctgtggctgtgcttctatcatgggcaaatagattgtcatccaggaagctaaagtcatttaggtagkataatargtttgtcatgaaattatcaatagaagtgctatctaataatctaaattcaccaccaatatttcttaaagtttatagtgctttataccgtggcccttataaccagaaacataatagaaatgraaaratgtggcttaaataaaaattggaagacaaattcaaaagcaaagaaactgttttgttaacagtgctgataacactcttaggtctctaggttaaaaaaactaaaatttccaaaatttaagaatctaaaatctaattgggcaccatggttcatgcctgtaatcccaacactttgggaagctgaggtgggaaaaatcacctcaacccaggagtttgagaccagcctgggcaacaaagtgagacctcatctctacaaaaagttttttagtctgggcgcagtggctcatgcttgtaatcccagcactttgagaggccaaggcagcagatggcttgagcccagaagttcaagaccagcctgggcaaaatggtgaaaccccatctctccaaaaaaaatacaaaacttagctgggcgtggtggcgcttgcctgtagtcccagctactcaagagtctgtggcaggaggatgcttgcacccaggaggcagaggttgcagtgagccaaaatggcacccctaccctccagcctggttgacagagcaaggatttgatcataaataagaaaataatataygaaagatgtgcaaccttgttgctaaaagaagttaaaatataaaaactgccatgagattcctttttattttttaactctgtcaggttggcaaagatcacaaaaggtagatgattgaaagtcaataaatatagtggttaagatcacaggtgctgtggccgactgctcaggtctgaaccccagcccgcgcttcactctctgggacttgaccttcccagtgccccagtcctaatgcccaagtggggagagtggtaaaatccacctcaggtggttgtgaagagttytgagaccattataacatgtctagctcgtggatatttgataaatattagctgtagttattaatttgcaaaggtgtctgaaacagacactgttgcccaacagacggggcagaaagctgacaagtggccttgggtttggagggatacttgctttttcttcttttttttttaatcttaatttttttttttttttttttgagatggagtctcgctctgtcacccaggctggagtgcagtggcacgatgtcagctcactgccccttccacctcctgggttcaagtgattctcatgcctcagtctcctgagtagctgagattacagttgtgcaccaccacacccagctaatttttgtatttttagtagagacagggtttcaccatgttggccaggctrgtctcgaactcctgacctcaagtgatccacccgccttggccttccaaagtgctgggatttcaggcgtgarccaccgcccccggccttactttcttacagtgcacccttttgtatattttgaattttgaaccattggcatggattgcccatgaaagaaaaataatactttaagcaaacacaaacaaagagtttggggagtcaggaggagtaggaagttcattgttttgggaaaaaaaattctgatatacaattaagaatcgactatttgtccttgaaacaagagagactcagtggaaaatgtatacttatcttatatgtgtttcaaaaacgcacacccagaagaagctctgaaactggagatggtcatggttgcacaacagtgtgagtgtgcttcatgccactaacctctaaaatgactaaaatagcaaacattgttatatacatttttcccacaataaaaattaaattaacaaaataagagatacgcctctacactctgccacacacgtaagtactttgttcacagaaaaggtctggagggatatatgccagagatcagataagacattctgtatggcttttattttcttctttgtgtctgtctacttgtgtctacttgtattttctaattttctcatagtgcacatgtattgtttttagatttttgttttttttgaracagggtctcactctgttgcccaggctggagtgcagtggcaccatcatagttcactgcagcctcgacctcctgggctctagagattctcctacctcggactcccaagtagctgggattacaggagtgagccaccatgcctggactgtttatagagatttttgaagttattttcaaaattagttataaattaatttaggttttaatacagtgtgstrataaattatttcatactaaatttgcaaatactttggatctgaatacttccagatccaaacatatcagatgaaaaatatyatccattagcttgatgacttgaaagtttatatttatgttagctgcaataaattttttgaatggaccatgtaatttagcaaaaatgtcaagcctctgttactctccctcggtatctgttttaccaaaatgtggcacctgccgcattccrcacggagtcattccactgaattcagtaacaagccagccgcaatagagcccggacatccgggtctgtttggtccttcccgactcgctgaagyttggggcatttccttatttgatacgtcttcattgtgaaatgagaccctccagggagcgcaacaccttttctgctgggacgcgctcaggaaggacagcgctcagtgctgggtgctcgctcccccgcgcagccacacctgggcttaggcgcagtgtcttctgcaccaaccccaagtccacttcgttccctccygctcatgaaagcacattgagaacaagcgagaggcagacatttttaaaacatacctcctaatccaagtttttaaagtaaatcatttgaaaaattcaatgctataactcttagcaagaaattgagggcacggaagctaggggtccagagcccacactgttccttaaatcaggggtccccaaccctcagtccctggtctgtcaggaacckggctgcacaacagaaggtggggggcagtgagtgagcattaccacctgagctcgcctcctgtcacatcagcagtgacagtagattctcatgggagccccgaaccctgttgtgaacagcccatggagggatctaagtgctctttctgagaatctaatgcctgatgatctgaggtggaatagtttcatcccaaaaccatctgtcccaccccgtccatggaaaaattgccttccatgaaaccagtccctgctgccataaaggttgggggccacacgttcgatgatcaaggtgtgggtgtgtggttaagcaaaataagcaactgtgaacttgaagggaaagaggaagcaagtgggtgattttggcaaatagaagaatcatgacgaggccaggcacagtggctcacacatgtaatccccacactttgggaggccaaggtgggtggatcacccgaggtcaggagttcaagaccagcctggccaacatggcaaaaccctgtctctactaaaaaatacaaaaatactatccaagaagcaatttcataaaataacccatatttctcagtatgattttttttttttttttttttgagatggagtctcactgtcacccaggctggggtgcagtgactattcacaggctctatcacagaccactacagctttgaactcccggcctccagttatcctctcacctcagcctcttgagtagctgggatgctccacaatacctgacttaataaaattttgatctttgcaaatcttacaggtgaaaaatgtattggtgacatttaagtttttgtttctttatgaatgaagaggagcatgttttatattcttacagccctaygtatcacttcctgtgtgttatctgttcatgtcttttrtcttttttattgagattttagtcgttttcttatttatcttaggaaaactttttatgttagggaaattagccctttgtgatatgagttgtgaaaatttgtttcccagtattccacgttattctgatgttgcttattatctttttgtcatgcagattttttaatgcagtcaaatttttaatctttgtgtttcttctttttgtttagtgttgttttgcttttcatcatgcttagaaatacctttcctagttggagattatacttaaaattttttccctttatttctttaaatagtgttatgttttcatgtttacattcaatttttcatccaattgaaatttatcctggcacaggatgagagatatggaaccaacatttttcttttccagatggctattccttttcctcctattgacttgaaatgccaccttcataatctagtaattttcatgttttaggagctattgctggacttacctactctgttccttgattcatctactataattattgtaattttataagagactttaatatccgataggtctagtccatcaccattggtcttttccagtttgcttctctgatttttaaaaatttaaccagataagtaatcattatttttaaatctgtcttttcatatgttctataatattaattattcaggtatatacttaaaatttgactgagttgggaaagractactcctgttttaaatagcttatattcacaggtaaaattacaggctatttatttcaaaaatatcaaggacttgtcgtccatataaaactggatttgctacaggcaactttttgaggaacactctttccatttagawtgaaacagtaatagtaatatagcatccctcaaaatttgttttgcatgcatattattcatattccggtataactatatgttcatttaattaccttaaaacttttggctggacagagtctcacacctgtaatcctagcactttgagaggccgagctgagaggatcacttaagcccaggagttcaaaatcagcctcatcaacatagcgagatcatatccctacaaaagaatcatttaaaaattagctgggtgtggtggcacatgctcacagtcccagctactggggaggctgaggtgagaggatcgcttgagcccaggagtttgaggctatagtgagwtgtgattgtgccattgtactccagcctcaggcaacagagcaagaccctgtctcaaaaaataaataagtaaaaaactaaataaagcttttaagactgtttttccattttctcattttcttaatattgctgtaaagcaatacaaaagactagaataatttacttcaaatgactatcttattttaggcctaacatacaccctgtgatactgcttgttgtaaaatcttgggcaagtcacttctgtgctcctcagttccctcatgtgtagaatgaggggtgtttaaaattccacaattctgagaactaagaaagaaggtctttcaatctattgattgctgatattctctccaggtctcagcttccrtgtctagaaaaaaagggccttgtactgaaatgatcttgaatgtctctagtggcattattttctttcctttttatcttttttgagacagagtattgccctctcgcccaggctggagagcagtagtgcaaatctgcactcatagctgcctcagcttcccaggctcaagcactcctcctgcctcagcctcccaggtggctgggactataggcgtgagccactacacccagctaattttttattttttgtagagatggagtctcactgtgtcgcccaagctgttctcaaactcctagcctcaagtgatccttcctccttggcctcccaaagtgctgggattacaggtgtgagctgccgcgcccagcactggtgttattttcaacatcccagctcacattgatgatcctgattctggatgagcaactgcctgatgggtgggaagtcaagtgctaggaagaatgtttgcttgattgttctttttattctgtgttttccccttacgttaataattctctcttctgggcagcctcttttagtgtcctctgagtggcaagaattacgttcatccaaaccaaaatttagggctaaaagaaaaatgaaattatctaagccagaagtttctgaagattttgaagaggatgscttaggtgtactactagctttcacatcaactttagaacgtggasgtgtggaaaagctattggatttaaattggacagagtcatgtaaaccaacagcaactgaaccactatttaagaaagttaagaaagtccactggaaatatctacatttttttttttttgagacggagtctcgctctgtcaccagtgctgcagtgcagtggagcgatctcggctcactgcaagctccgcctcccgggttcacgccattctcctgcctcagcctcctgagtagctgggactacaggygcccrccaccacgcccggctaatttgttgcattttttgtagagacggggtttcaccgtgttagccaggatggtctcgatctcctgacctcgtgatccgcccgccgtggcctcccaaagtgctgggattacgggtgtgagccaccgcgcccggccggaaacatctacttctagccttttttgtgtttctgctccagcctttggttcctctcttccccggctgcccgctctcacaatgctgcttccttgccttttgcctcatattgtcagatagctagttttggttttgctgctccttccagacggtttgatgcatctcaattcagccaaggccctgcgcctggcagttgtgctgactggatcccacagttggcgtcttgtcccacaggacctcyccagaacccstcttctgcaccctactgtggcattactytttcagggagytcattgagctccacacagtctgctccactgcaacctgctggaggccgtatgaccaggccttctgctggcaccttccctgagctggattctccccagcttcatttctctcttcctacagaccctgatcccatcagaggttttgggtcttatcatccctctgcttcctctccttttcattttcaaccttccgcagcctctttgactgccaacctgaggctgccaatagcctctgccttacctgagcctctttacagtcagtcctggactaccccagtagatctctgtcttctggaagaatcagtaagcggtctcgaaggaagtcaatatcctgactatggttttcaaagttgttctgaaacagaaagtcatgagctatgagaagtacttctagacagytgctttttacaaataaaatgtgatacaacagacaacagtatcccgtgcyttctggaggtaatagaggaggatgaratagtgtgcayacagcactggcaggatgctgtgccttggactgaactcttcagtctacagacagaggtatgtgtcttatttctccttaaatctgtggttagctggcttcatagtttagaacggggctcctcaaagcagctggtcaaggaactgtctatcgtcagtctgtagtgaaggaaggggcttgtgcactggggtgtaaatcatactgcttccttcactgaggaactcttgctacagaacaaaacagacagctgaacaaaacagwgtgcttgatgctggctggtgtttccctaccaacattagaccagaacctcatgctggggaatgttactattcctcacrtgaaaatgaacatctctgaacagatgatggggtgagatcttaatttcctagattctagaactaatggattgtaatccacataaatttcccactgtgaagtagagcacaagcacttgcacctgtactctaaatattttcwtataaggtcatgggagtacagatattattcaacatgtagattgtgttagagcttatcactccatttgttaagctgataaacaccctgtagatttggccccatcgctggtactaagacccagtcctgcatctgtgattacttgttttgktgtaaagyagtttagtgaaayggaaagggcttgatgtagtataaaagtaagsstgagtcccagcccactttgtgatttggggcaagtcaggtaacctgtctgarcctcagcttcctcatccatatagtrgagataatgatagtgtctacttcacagagtgggtttggggtttaaacaggataatcacagctgcccagtttccctacttgagacagtgcacccaaaagcctgccaggagcatactgcaratggtcaggagtgtggatcccacggccactcctggctctgctgcttgttagctgtgagactttagacaaattgcttaacctttctctgcctccgtgttctcatctgcaatgtgggtgtgacaaatcatgctccacaggaagtggctaaacayatmaaagaacagcacctggtaccagttctctatgggttggtacacattatcactgctgtcatttttcaaattattgccatagatccttcaacctgtgcacctgcctagggccacaccctgctttctgctccctgtgttggtttccctagggcctggattctgtctccgttgaggttaatatccccaagctcaggcttagcacactctcctctgcatgtgatggggcaggcagatgatggggggtgcagggaaggtagttttaaagtgcatgtttaatataacaattttgtacttagaaaaaactgtcattttcaygtttcagactacatcagggtacatttttatgttaaacaaaaggaatcatgctggagatctactgtacaatacacsgcctatgattgacaatccgatatggtatactgaagcatttgctaagaggtctatcttatgttaagtactctttccacaaaagggaacaaaacaaaacaaaaggggtggaagaaaagttctgggagtggtggctaagttcatggcattgataagtgatggtttgatggtttcaygggtgtatacttatctccaaacacatcaagytgtatacattaaatattggtgactttttgtatgccaatcatatttcaataaagtggggtttttttaaagagggaatcatgctatttaaaagtttgagaaataccrgttcaatgctcattgctagttgacaatgcagtagggtgactatagttaacaagacattgtatatgtcaaaataactagaagraaatatttgaaatgttgccaacacaaatacatgataaatgttcaagctgakggagatcctaaataccctgacctgattatttcacattctatgcatgtatcaaaatatcatgtgaaccccaaaatatgtacgagtattatgtatcaataaaaaatgaaataaagcattgctagaagaaaaaaagtaygatttaaaaaaatctctacacatgagcctctttccacactttttataaatgccaccagatatgtagtgttcatagcatttatgaggttccaaacaatactatgtcactagtgtatgaagaactttattttacagtaataaaaatgttagaaatgccttaattaactgaaattcaatacatggaaacatatttatcacataacttcttttttcatttaatttgttaaaattttattttagatgcagaggtacacgtacaggtttattacatgggcataccgtgtggtgctgaggtttgggcttctaattgtcttgttgcccaagtagygaaaatatgwttttcaaccttgcccctctctctccccyactacataacttcttatgtcataaaatgtcaataacataacttacctttgttttcttaattttgtaggatggcttctggaaacttacaccagaactgggatttatattaaatcttaatacaaatgctttgcacagctttcttaaacaaaaaggcattcaatctctaggtaagtcactatgtttccatttattaagtcattattttcattcattcataagcatgctcctaactgttataaactattttgtaaaytagtgtactaatgtaataattatgaaagttatatttgaatggaattgtatttaagcattaaaggaaatgggagattggcttctagtcacatttttaccactaactagggtattgtctgtgcaaacttattagcataaatagcaccaattgctgtaaaaaagacatttcagwagcttaacataaccaaagattactttcttgtccatatcacagtcaaatattggtcaggaagaaagttccacttatgtggtcatttagagaccttgactccttccatactgtggctccaccatcttcaatatatgtctttaaaattatcctggtaagagagaagaacaaagattaccctggyatcatccccctgctagacaagaggaagaatactagtcacatagccccatccatgtacgaaggcctgagaaatgtactgttaagctgmgtgtccaggaggagaaaagagctctgatgagctcctagccagcctctgccagaggcagttgttcaacctctggacctgtttcctatcatgacaacaaggggatagatgaggaagtcctgagcatcsttgacccagcaagtggtttgaaggtcaaatgctagccctaggacaggagctgtttgtttgtttgtttgttttgagacaaggtctggctcccttgcccaggctagagtgcagtggtactatctcggctgactgcaacttctacctcccaggctcaagggatcctcccacctaagcctcctgagtagctgggactacaggcacctgccaccatgcctgactaatttttgtattttttggtagagatggggtttcgccatgttgtccagtgtgstctcgaacttgtgagctcaagcaatctgccyaccttggcctcccaaagtgttgggattacaggcatgagccaccatactcagcctggagatttttttaataaaatacacattattaaacaactagccaatattcatgaatagatagaacagcagtgtctcactggccaccatcacctctaaaatgccagagttttcagattccaggctgggtgggtgggcaartgcatagcctgtttgacctgcactaggccaaaaagggrtgatgacaatttacktgaggagtgagtgcttgatcctggaataatagaagagcctctatctgactaactctcctgccaataacagttattaactttgaataaaatgtttaaaaccrttctttgaaggctaggagaataatcaaaaacaggcagaaactagagtgaatacaatctttgaaagaaagcaagccaactaggtgggctccacayatatccagcttgtcacctaaaggcatttctcagctcatgagacacagtgggaggtttgaactaaaacagaaagtcttaatgggatgaggacacggggwtggagtttgaggttgcctacgtggctggaagttaaggattaaaatcctataaagtagggaaccacagagcagggagctctgaaatctgcatccaaatacccctcagattcttggctgtctcctaacctctacrtatacagggtgcaacctcaaggaatccagaaaaaagccacagctgggaagctacagagctaagcagagatttcagctgctgcctagtactggccagagtttacagttcaagtggcaccaaattagagagactttatgaatatctttccattgaagccataaaagggtcataaggatcatatctcatgatcaaggactatrccccaggacaaaaggataaaccaaaatagacccatcctaataaagcctaaaacaaagcctacacaggacccaccagaacaaaactgaacactctttagagtaagatagcatagctgagagtctctacaaggtgtcatttttaatgttcagtatggaatgaaaatttaataacatatgaagaagcaggayatgacttgtgatcaaagggaaaatgggctacaaatgctgacccacagatgacccagatgttagaattagcagacacagactttaaagctgctattaaaaatatagtgaaggattgatttaccagaaaaggatggaatgggtgaataaatggcagaatctcagcaaatagatggaaactawaaagaagaaccaaatgaaaatcctagaactggaaaatatagtatctgcaatgaaaaggtcattgaatgagcttaacaacagaatggacacaacaggaaaaaaatcatttaattcaatttgcaatgtactcaataaacttctctaaactgaaatatagaaagaaaaaaatagaatgaaaraagaacagaggagccaagactgtggaatgatatcaaaagatttaacatttgtgtaactagggtttcaraaagtgaaagggtaracagaaaaatatttgaacagttttgtaaaattgatcaaagacagcaccttccagatccaagaaactcagcagaactccaagcacgataaatacaaaaatgaccacatttagataggccagagtcaaactgttgaaaaccaaagataagctgggcacggtggctcacaccagtaatgcctgcactgtgggaggccaaagggggcagatcacttgagcccaggatttcragaccagcctgrccaacatggtraaaccccatctctacaaaaatacaaaaattagccaggcatggtgacatgcacctatggtcccagctacttgggaggctgaggtgggaggatcacctgagccctgggatgttgaggctgcagtgagccatgattgtgccactgcactccagcccaggtgacagagtgagataaaaattcaagataaatatattgtcatgtgaggctagagctcagggaagaggtcagagttggaaaagactgggagaattctcaatgtcagtagtatttaaagcctggcactggatgaggtcacccaaagaaagaaggtggtctgagcagagcaggtgctaggaccagcctgccacacagcagggtttagtgttcagactgcacaagaaccagcaaagacgctgagaaggagtggcctgagaaacaagaggaaaactggagaaaattgaatcacagatgcaaggggatgggatttcatggatgtaccttttccatgggcttttcctgtgtttcactgtattactccctattatccatgttatttttctgtaagcgtgtgcttttctttcttcctctacgtagagtctcaagctgatttttttctctgacttgtttttatatctctgtayccaactttgtcttttatcctcttcttcatttctcttttatcgtcccttcttctgaatttgttttttaaatgacgctgatacacattaggtatttcatcagtttattatttattatattattcttggagttgtatgttgctattattaatattgcttaaaaattagtctaacattttgtaaataatacccaaaaaataagccacaaaagaatccagcaaattaaactgcttttgtctccattgattttcttttgtgggacaatgtattagttttcttattttgtttttaaaaatttattcaatccctttttcctctattaagaacattatattatttaataaaagccctcttatgagcagttttggctacctcaatgatgtaaaattaatggtgtatatgcagatatgtgcatactctgccaggtccttttgtctttactcaaaaaaagtaattgcatattcttaattataagacaaagatttggttttttttttcttccctaaaaccattttttggctrtgtgctgtggctcatgcctataatctcaacactttgggaggccaaagtaggaggatcacttgagtccaggagttggaggctacagtgagttctgatcacacccactgcactccaacgtgacagagtgagcccgtctctcaaaaaaaaaaaaaaaatgaagctkgtatttttaaaataaaaatgggttgttaattctgagttcaacacatgtaaacattcatttttcaattttgatatttcataatatagtaaaatatcttgattaggatacctgtaggtactaaccactagaaataatttgatacaccagtgtaactggtcataactgttgtttatctgttgaatatttaggtttactcttccaagctatttgtaacaggagcctaaaaactgggtttctttcattgcacttcatggctcactggtcattgaagatggcaagcgaggggcactctggatacaggtcagtttcctgacaaccatcaggatagtrtgataggcacacggttccaactgtcctcatttrtttaaatagcaagctaattaaggaccttgaagagtattagagagtttcacgatctgctcatgtcctgtgatttaaccgtattataattctttaatgggaattttataaacaggcagtttgagatgcagagtttccaacagacttaacggagttttttcccctttaggtgtaaaaggaagagaacatctcctggacctaattgccacaatgcgatactacagtttattcgcaccaggttggaaaaaacgggaatagtgttcaaatcactgatggaactggatgacgcttctatttccaggtggctttaactatagtattaaggaacttatttatattttcaactatttatttaataaaccttacaaacaagctacagggaattatctttcatgtgtaggctactttataagtatgtaggaagataatttgtttgcaggcgacagcttgcccacagtctcctgtggcgggcagggctgatgtggtatttgtgccttggcctgcacaggaaatgggctcaaagaatttcagtgcagctccccctggagcccggcgcttctggctctggwtgtggtactcttcacagcagtctgctgatcctgggtgcctccagaagacccacagtgtgactgttgggcccwgccctgttcccaacaatggcagggcctgggacaagaatacaatacaagtatttaaagtttataactttatagtttataacaatacaagtatttaaaaagttgtaaatcaaactagcaaactattagattaagtgtgtcctaatctcctcccttggcaaatacaacttcataaccacctggaaggccaggttcaaattcagcccttggctgaccccyagcaccctaagaggccttgcctgcacacgtgaataccccaccccacccatcaaaatgccatccagaccccatgccagtgccccctcacaccagccaccttgtaacaccagtgagatggcagcactgttcaaactcaggatgacagaccagggaagaccctggaagtggactcagggccatgtggtcagggacgctggagttgcagggtctaaaaaggaagatatgggctccggggtgggcacattctcttgtccctacagaccctccaccccatggcgagaggggcatgaccagagtaggatccctctgacatacatatatatgtatatacatacacatatgcacatacatacacatatacacatatacatagacatatgcacatacatacacatatacacatatacatacacatatgcacatacattcacatgtatgtgaaggcacacatgtgcacatacacatatgcacatacattcacatatacacatgtatatataagtatatacatacacatatgcacatacatacacatatacacatatacatacacatgtaattggcttatgttcttttaaaggcaagataaggggaaaactaatcaaactaataaaaatactattgtgagggaggtttggtagagaggacaaggatggaagctaggtttctcctagtgtgctttgttttgcagttttgactttggaactatgtaaatattttacataataacggataagattgatatttatttatttatttgttgagacaaagtctggctctatcgcccaggctggagtgcagtggtgcaatctcagctcactgcaacctccgcctcctgggctcaagccatcctcccacctcagcctcctgagtaagtgggactacaggcatgcaccaccatgccctgctaatttttgtaatttttgtaaagacagggcttcaccatgttacccaggctggtctcgaactcctgaactccagcaatcctcctgcctcagcctcccgaagtgctgggattacagacatgagacaccatgcccagcctgggaattaatttaaggtgactttacaacatagtaaataatttgactgtgtcaaattatgtcaaatcccctagtgggatagtgcctaaggattaaaaaatattacaaagaaatctcactgggagtagccatggtgttaataacacttttgatttgttattttggaaggtagatactaatattgttagaaaccaatatgtataaaatcaaataagttaaacgaaaccccttgatttctaaacttgaattagatcagagaatagaggaacatgatatgtgacaccatgcaaatgcagtcagcaaagtctggaatgtggggaaataaatggcaagagaaaaaaaggtttgaggagcagaacctgtaaataaacctttagagacatgtcaaccaaaagcaagggtagaccttgtttagatcctggtttgaacaaaacccactgcatttaaaaaagtgagacaggaaaaattaaacactacctggatattttatgatatttagagaaatattgataactattttttattttttgagacagaktctcgcctgtcgcccaggctggagtgcagtgaygcaattttggctcattgcaagctctgcctcccaggttcacaccattctcctgcctcagcctcccaagtagctgggactacaggcacccaccaccatgcctgactaatttttttgtatttttagtagagacggggtttcaccgtgtctgataacaattttttaagtgtaatgattaagaaaaagttctcgaacacaaaacaggtgttcaggaagttctggactaggcacattggctcatgtttgtaatccatgcacttcgggaggctgagatggaaggaccacttgagcccagcaagatcaagcccaggagtttaagaccagcctaggtaaccaatgacacccccatctctacaaaaaaactttttttaattacccagtcattgctgggcacagtggctcacgcctggaatcccagcactttgggaggccaaggcaggaggattgcttgcttccaggagctcaagaccagccttgaccacatagcaagaccctrtctctacaaaaaaaattaaaaattagccgagtgtggtagtgtgtgactactcaggaagctgaggtgagggggattgcttgagcccaggaggccaaggctgcagtgagttgtgattgtgccactgcactccagccagggcaacaaagtgagaccctgtctaaaaaaaaaaaggagaatcataatttmctatatgtaatttatacttccattttttaaaaagcaataccttctcattagtttgccaaggaagatgagaatttattcttttttctatttggggggctttcttttttttgtatttatttatttatttatttatttatttattttatttatttatttattgaggcagggtctcgttctgttgcccaggctggagtgcagtggcatgatctcggctcactgcaacttctgcctcccaggttgatcacttgagcccagcaagaccaagtccaggagtttaagaccagcaattctcatgcctcagccttccgagtagctgggattacaggtgcgcaccaccgtgcccggctaatttttgtatttttagtagagatgaggtttcgccatggtggccaggctggtctcaaactcccggcctcaagtgaaaataaaccagtgccacttgccragagaattaattaaataaatatcaaagaaaaaacactttgaacagctaggggatgggactaaaaaattagtatttgacttaataggcacatccaaagaggtagttattctatttatattgttcctaattagtaatattatagctgttagaacaagtataaactttgaayctgcttttgaactgtaataccacaaagtattaaagcaagattttcaaaattgatcaagtatattccagcatatagctcttgctacattactgctatggtgctggcaaaatggtttgctggcacttgaggacataagacaatacgatttcaggccgggcgcggtggctcacgcctataatcccagcactttgagaggctgaggcgggcagatcacaaggttgcagtgagctgagattgtgctactgcactccagcctggcaacaaagcgagactctgtctcaaaaaaaaaaaaaattaaatattttttatttcctgtttattgcatgtttgaaactttgttctgtattttctatttcaggatgtacgtaacattgatgcaggagtgcattacatgggggtgtgggcacaagattttcttactagtggaatgtgaaccaaaaagtgtagaggccactgcactaaaggaggccggctcaatcagtgaaaatattcagagccagttttgtcgttttcagcagtcagtaactatcagtagacaaacatttaccaggaaatgttggtcttttaaacactttgggcatgcttcttatttagtatgttcattctatcatgacattcagtgaacatttattgagtgcctactgtgtaccagggattagtaagcacgttaaatttataagctttgttgatttccaccacaaacccataggacctcatgttattctcataattgaggaaactgagattcccagtgttgaatgaaagccacacagtatcacatggccaatatcatgtgattgcagagtcaggactcaaacccagctcttcaccatcacgctatactgacagccctttcccagttcacagggaaaaatcaggaacagggagagaattttcaaaatattaagtttccccatagaattttctgaagaactttggtgtatgttgccacttgttcactaacaagttctagcagatgacagaacaaatgaggaagtagctaattaatattaatgaacaacctcagaatttttctgagtgttgaatagacttgaatattcaacagtctcaaatatttgacaccatttagtggacacagacttgactcgatatgcttattctaccaagttgttcctgrtttacgtgacacaactgaatgtatgccagtttcatgggggactctcagatattctgaaggtacctaatcaagtcagtatagtgggaaggagagagaaacagaagcctcatttgtgaaatagtacttgagtttgtgcgtgaagaatggataggatttagactgagaagcgtggaaaggggacaaccataaacaactgtagagaggctggaacgtgagctgtgctgcaggcagcagggatgcctggaggcacgtggaagccaggaggtggcgggcacagggcacttgacaatgcagtgcataagctcgaggtgagacgggcagaagaacttccgtaagatgccaaggaaaactgcttttattaaatatcttaatttttggcagaatcattttgtctgatataatgtgatgggtttagtaccacattacatttcacatgttatattctgaaatctgaaacttttttttttaatctaggaatattccctgggcttttgaggcaataaagcaagcaagtgaatgggtaagaagaactgaaggacagtacccatctatctgcccacggcttgaactggggaacgactgggactctgccaccaagcagttgctgggactccagcccataagcactgtgtcccctcttcatagagtccttcattacagtcaaggctaaatcaaatgaaactgaattttaaactttttgcatgcttctatgtagaaaataatcaarcgataatagatacttacaatgaaactccattaaggttttattcagtgtagcaattagtgtctttaaaaataaagtggaagcagaattactttaatcaactaacaagcaataatgaaacttaaaatatttcagttttctgtctcattttttgttgttgttgttttattttttatattttttattttttgagacaaagttttgctcttgttgctcagactggagggcaatggcgtgatctcagctcactgcaacctccgcctcctgtgtacaagcaatgcttctgccttggcctcccgagtagctgggattacaggtgcgtgccaccatgccctgctaattttttgtatttttagtagagacaggatttcaccaggttgcccaggtaggtctcaaacttctgatctcaggtgatccacctgcctcggcctcccaaattgctgggattacaagcatgagccactgcacctggcctgttgttgttgttttagagatggtctcaatctgtctcccaggctggagtgtggtggtgcgatcataccacactgcagcctcaaactcctgggctcaaagaatagtcccacctcagcatcccaattaattgagactataggcatgtgccaccacacccagataattttggggtgtactttttgtagagatggggtcttgctatgctgcctaggctggtcttgaattcctggcctcaagcaatcctcccacctcagcctctgaatgtgttgggattacttgtgtgagcctctgcacccagccagtgtttcagagctttatggtgatgagagatgcttctggatggtcctgggagcctgtgttctcctcacattcrggagtccagtggaaagctggctcagctggactgagcaagctgagaagaaacatggtcttttgtaggggatctgtcagggtggtgggagaaattataaaaattaagttgtaggaaatagacacaaaacttcttggatggctgggaggtttgcatagcttctgtaaaagatttggctgaaggcagctgaattctcttaaaagcttagggtgtagatacatacgaaggtggaggagtttatctaaatagcttgtttactcatgtggtcctaaaacagacctttgatcatttgcaggcgcatgactgctctctactcaggaggtcagcaatgttaattaccctctagtggtgtggtgtttacttgagacctttgtcattaaatctctactgaataaatgcctggagccccagcctgacagggctgtgcctgctgactctttacagcaccctcctcagtgtctgggagctgcccggtcccctaccccactctttcatgggatacctgtgtctgagtgcatttcttcatctgtcatgcagccagggtctgcaggttggacccagcaagttattgacagagtttgaaaattatacaggattggtcrttgagttggatattttagtcaacatttattaagcccatgcctcagcagtagttgacttttgtctaaagggagacaaagaaattctagttttcccaaatgtccaaggctccaaacaaaacatactgaatcagaatttccagaagaaagtcctggcaacttggatatttaataggtgctccaggttatcaagcacattagaacacaatggcccaggtgctgtatctcaaagtgtgagtctgtggactggcattgtctgcctcactcgggaactcatcaagagaggcagaatctctggtcctgtttgagactattgaatcagaagctgcattttaattagcaaggccctcaggtgactcctgtgcatgtttatagttgaagggctagtggaatgtggtgacaggaacatatttggtgcttgttcagggctttgttttaagaacccatgatgcttgtgcccagtggagcaacccatcagtccaattgttgggagaaaagctgaggcaagacttgctatctgacataatatgaaaagagccttggaacatgtcctgggtccagagtttaaaacttcttgtggcctatggaacaccaggctctgtgcttaagggtggaaggctgccccactgcactacaacctaagcccagggcataaaacccctcgtggcttggatggaatccaggactcagtacataaaacccctcacggcctctggaatgtgtccagacttgctggctccttgcttcttgctctcccaggatcataaattgattgtatcttgaggtagaaggaaatgttcaacattatctygagtagsagaacatgttccatatgcttcaaagaaaatgctagactgacacagctrtaaactaaacacttgatgtgactgcttcctttcaaccagcacatcctcgccacctgcttctttgtttaatcaccaataaatggtgtgggctcccagagttcaaggccttcacagcctctatactagcgttggccccctggacccactttatgtactattagcttgtcttgtctcattcctttgactccgccggactttgtagcccccacggcctggtgttgggtttgatcacctcaacaccaatgtggatatttgtgactgcctttgttttataatatttttattattcaccttgtacrgatgaagacttccagctgtagaggccaaaggggccamactgcaggtagagcaggcattcaccaaggcgtttgtgatcctggggtgcagctcccacccttggctgcctggrtgcttctttccasacctactgtcttgtgacrtycccttaggcacscarcacaggctgctktctsatttagaastgagcctgttcagttgatggctcagygcaggcctctaaaaaagcaagcctgatgtgggttagtacatctgtggttgrcttacttatttggtgttcattttttcagttttcagaaaggtcagttgaagtgctgctggtggctgtagaattgatacgcagggraagtttttgatctgtgygctttctaagggacaattgctaagcygcactgataccttgagcccctttcctttggaacaatgtagagcccagttcatggctcccagaagtttaggtccagtaatttggctgcaggcctagagaatgggaggctgcagacttggactaatggtgaactcttgcctccccccagggatatgtggtgcctgtcataagctccagagagctgccttccatgagaccagcagaagagtgggcaaacatgaagtccaatccccctatccaggctgccattgacctcatggcaggggctgcaagtacagtcctgtgcctcataaccatgtttctgttggtgatggatggtgtatctgatggtggtcccatgagattataccatcttttactataccttttctgtgtttatatacatttagatacacaaataccactgtgttacagttgcctacagtatccagtacagtaacgtgctgtacaggtgtgtagacttgagcaacaggccatactgtacagcctaggtgtggagtaggctacgccatctagggtcgggtgtrtatgctctatgatagcacaatgatgaaattgtgtaatgacacatttttcagaacrtgtcccagtcattaagaaatgcctaagtataatcccagagaaaacccagtcttctctattmctcaagtaccttctaaatgagatcaaatgaaagtggtatgaaaacattgcctttctccctctagaagtgatgggctttacctttgggatgaatccatttgatggaagtgttgttcagagtgtggcagaaggtagaggagtgtccattattgctaacaccttgtgagtcagggtgagggggggaatgtgcccagtacagctggaaaacagctcagaggtgaagccccttgtccactgtcacctggctgggataggcaggtgacatggttcttcaattcaagtctggcagtcttcagagcccttgtagtgcaaaaataacaccgtagcatctcccaggaaacaccacttactgtccctgctagtgttggcaaagaaaggaggacactytttagaagtgtcgtttacaatgagactgataatggactgtgtcttagagccatgaaaggaaaggagaagttgtaggatttcctgggaatgtcagctaacctgagcctaggggcctgagcccaagggcagactgaggctcccccagcacagggaggtgctacctgtgacaagggggtagtgctggcacagtgcaggctactccctagaaagatcagcttgaacatgcaggaagagcagaaccctcgggctgaggcacaggcggaataggaagtgcatggtggtaatttagctctcctggggccagaagtaggaggagcggttggaaagctgattgcccaaagggaaaccctggactaccctggcctcccacaggactctcatagtaattgtggctycctgcagtggggaggccagaaggagtgttgcccaatgctgtcctcatccagtccaccccccacccaccaccaacagatgagyatggtcatgagtgtrgtyacctcatcagtcatttgctcagctgtgaaaaagaaattgttcagagaagagcaaagtgtttttccatgagccagaggtcrgccaaggtatgctaatgaggaggactggagacagcgcatcacagacactgataaggagcactgggcaagggcacttctcccagggcagagcccayaaggagcgtcctggcaccasatgctcagggaactgaaggctggcaggggcccgcccagtagtctcttgcccactgtgtgcctttaggctacagcctcccaggccccgkgcccccthccttcccccatgccacactggggaagatgctgaccctgagagtggtgcaaccatctgcctgcccctggccacctctcaccagcacgtgaatgctcttgggctcagttctgtctctgcagtaggagggtgtttagccacatgacagagtctcaccttttgacattttatgtctttcagtctgtcaaagatctagaacatattttgatggaattaaaaagtttacttttggctgggcaaggttgctcaagcctgtaatctcagcactttcggaggctgaggcaggtggatcacttgaggtcaggagttcaagaccagcctggccaatatggtraaacmccgtcyctactaaaaatacaaaaattagcaagatgtggtggtgcacgcctgtaatcccagttactcgggaggctgaggcaagagaattgctctaacccagaaggcagaggttgaagtgagcgaagattgtgtcattacactctagcctgggtgrcagagcgagaatccgtctaaaaaaaaaaaaaagagtttaccttttcctgtttatgtgcatacaggtatttgggtaccacrtttgtaattcacagttagtttgaaagatagaaattgaaacagtatggttgggagcctggtatgtaagccgtttgctggtgggcatgtgtgtattgggcccttgtatgtacgatctctgtgatcccatcattactgttcatttcttccaggagaggaatgacacacttctccctttaattgccagattatctccgattctgaatcagtggaatataatttaatatgattttactatgattaattcagggtcattctctcccaggtgctgctgggctaggataaaatgagatctgaattacattaaaataattaagtattccaagagaagaggtgacagaatgktttaagtggstgygtartttagataacctagatgcagataagctgaatgaagcatttaatccagcacattcgtatttyaacttgatcatcagcaatgggagtttgaaacccgattgcagctgcaggtyccacacaactgaattcggttccktgtgcatagtagtgttcrctggagatgcctggaggwctgaaggtgtgcccttttataggcaggaattccaccaggatgggtatagcttgttttttttaaaaggcttgggactrgataygattgcccaagaagacagtgtagacagcraggagggctgagcatgaatgggatgacctaccagcacaaaaagggcaggcaggaaggcagtaaagaaatgagcagggcccaaaccaggagagtgtggcatgccacrrtggagactgaacagaarcaaaacsaygggcgactgtagtgttgttccctgttgaaggagagacactctrttayagaagacctggacttcagttcagttcagtttccttagyaaaggacaaaatggggagagaagacagggaatcagggaagaaaaactcaytcacttaatgtgasgcaaacatcgcatgcagtcgtaccaaccaaswaaacatgataagctacaaagaactatggttttcrctrctctcaaaaygcyactgagattaccargttttaagcttatttcaagattatttataggtgattccccaactgggaargtcatttctgaatttcttctcttctaaaatakatctagaaaaattaacaaacyttattccagtaagaragtttgggatgtactgcttcagcccctgtcctaaggaaattatcaagcctggagggtggggtgctatcaactgcctgccaacatgttaccttctggmatccagaagcttccctgtgccagrtgkagccaccaatgtggggaggagagcacaaagagcagagaatccacagaaaccatacctgcagggagcaaacaccatcacaccccactgctgtgaatgsaaatgcatttacctgttcttrccatctccctcagcatkttgaatctattctgggattagacaagctcccagacttamctgctatgtttaataaaaacayggtaaaggaagaatcggggctattaaaatacttaagaatgagaaagttgaaaaaagaaaaaaagasgtagattgtgtttggcmtgtcttcyccccaccgtaagggattgccagtcagctggaggcctgctggttyatgtgggccagccctcgacacctcagtgaccaaacgaaatacaacmctcactagagcttcttgtacttggcaagacccagacatagacctgggctaccaaacaaaaccttgtgttcttagagcctgagaacaagagctttgacagtttccacaaagaacccttccgcagcattagcatttctatcttcacctacctgcagccattactgcattgaactctggaaatgtcacatcagctgttcttaagataaaataccatttgctattttttttttcctctaggccctgtccctttgatgttaagtggtggagggagttggcgggatttgctctggcttgcggtatatccagtggattgtatcaaatccagaaytcaagttctttccatgtctggaaaacaggcagaatttatcagaacctttataaatgttgtgaaaaatgaagctgaataaacacctgtttttccagcatctattatacatcttaaaatctgagatatgaacttctctgttttgattgtaaaaggaaagagaacagtaacacagaaactttgtgtcccaaatagagcacagataccttgtctattactcatagtaatcctcccttaaatttgtataacatgtgaaattttacaaagtacttatacctcccttatctaattcaatcttcataaccaccctgggcagtactaatattttaaaccagtctccaacctcaaggttggtgctcttgccactgcccaggtgaagctgcaaagctgtggccacctctgtctccatggttgcctctgtctggccatctcaggcctcaactctgccccatccatatactaagagttaaccaagcatggaattggggtatgttacatgagcatcagtcagttttgccaggagacctgatacttgtccttgtttctrttggtctatttagggaaagctgsgaatgcgtccttctatgacttgttggtttttagcactcttgtctggatttgcatgtgtaaatattcctgtactatgcagctgcatgggtgtccccaaaggagggattgttgcagtcttygcttgcccttttgtcttctaggaataatggccttatattctggactgaaacctacatgattcgagcattccctgacaatggagcactctttttggcctatgaatatagcaggaatttgatgatgagccagttggaagcatactgaagtgtcttggagggcctgagccaagcacaggtgtttgaggactacagttcatttcagggtttcttgtagtacaagaccagcgtgaagtcattctgatttcttgggaattttgcctttctgtcttctcttataccctatatcttaacttgtttggaagaacctctattttgcatcatgtcatttctgcccataattgtactgaaatagagaagtcactgctctttcccttggtaaaatagagagtggtcagtaggcttatgcacctaattcaaaagactgagtacagttctgtcagggcttttacataaacctctacttgcacattcaatttggacagttatgtgttgagggaaatacagtttggttccatgtttatttcaaatattgccagaaaaacccagaggtgatcgtttttcatgaagatgcttacaaatggttgcttaacccattctagatgtaggatctgcttaatgtgtgtactattctaagtggttgatttttttttttaaatatggagtctcactctcttgcccagtctggagtgcagtggtgcagtctcagctcactgcaacctctgcttcctgggttcaagcaattcttctgcctcagcttcctgaataagtgggattacaggggtgcactaccacacctagctaatttttgtatttttagtacagacagggtttcaccatgttggtcaggctggcctcgaactcctgacctcgtgatccacccgcctcagcctcccaaagtgctggtattacaagcatgagccactgcacctggccaaataaaacatatttttaaccaataaaaattaaggacaaagaagagcattccttatagaatgataaagggcacaattcaaccagaagacttagcctaaatatgtacacacccaacattggagcacccaaattcataaaacaagttgttcttggcctacaaaaagatttagacacacaataacagcaggagacgtcaacaacccactgacagcaatagacagatcattgaggcagaaaactaacaaacactgtacttgcacttgacagttgaccaattggacctgatagacatctatagaacactttgtccaacaaacacagaagatacattctcatgtgcacacagaacatattctaagatcaaccacatgcttggccataaagcaagcctcaataaattcaaaaagtttgaaatcataccaagcacacactctgaccacagtgagacaaaaatagaaatcagtatcaagaagatctctcaaaactacataaatacatggtaattacataatttgctcctgaataactcctgggtgaaaatctaaattaaggcagaaataaaaaaattctttgcaattaatgaaaatagggacacaacataccagaatctctgggatgcagctaaagcagtgttaagaggaaagtttatagcactaaatgccttcatcaagaagttagaaatatctcaaattaacattcctactttgcacttaagggaactagaaaaaaagaataaactaactccaaagctggcagaagagaaataactaaaattagagaagcactgaatgaagtgctttttgaagtgctgttttttttagactagatacaaaaatccacacaaaagatcaatgaaaccaataattagtttttcaaaaaataaacaagatggatagcctgatagctaaacaaagaaaaaaagagaagagccaaataagtacaatcataaatgacaaagatgacattacaaacaatcccacagaaatacaaaagatcctcagagaatactataaacaaccctatgcacacaaattagataatctagaggaaacggataaattcctggaaacatacaatctcccaagattgaattagaaagagattgaatccttaaatagacaaatgccaagttccaaaatcaaatcattaatataaaatctaccaacaaggaaaagccctggactagatgaagcaacagctgaattctactggaggtacaaagaactggtactagttctattgaaactgatccaaactgaggatgaggggttcctccctaactcagtctatgaagccagcatcagcctaataccaaaatctggcagagaaacacacaaaaagaaaacttcaggctaattactctgattaacatagacacaaaaattattaaccaaatactaggaaacagaatccagcagcacatcgataagttaacacaccacaatcaagaaggcttcagtccagggatgcaagactggttcaacatacgcaaatcaataaatgcgattcaccacataaacagaactaaaagcaaaaaccatatcatcatctcaatagatgcagaaacagcttttgataaaatcaaacatcccttcacattaaaaacctcaacagactagacatcaagggaacatacctcaaaataataagagccatctatgacaaactcacagccaccaacctactgaatgggcaaaacttggaaccaatccccatgagaaatggagcaagacaatgatgccgactctcaccactcctattcaacatagtactggaagtactacctagagaactcaggcaggaaaaagaaagaataggcatccaaataggaaaagaagtcaaattatctctctttgctgatgatatgattctatatccagaaaacgaaagactctgccaaaagcctactagaactgataaacaactttagcaaagtttcaggataaaaaaatcaatgtataaaattcaacagcatttctatacaccaataatgtccaggctgagagttaaatcaagaacagaatcccatttatggtagcgacaaagaaaatgaaataactaggaatacagctaacaaaggatgtgaaagatctctacaagaactacaaaacactgcagaaggaaatcagataacacaattaaatggaaaaacattccatgctcatggattggaagaatcagtatcattcaaatggccacactgctcaaagcaattgacagattcagtgctatttctatcaaactaccaatgtcattcttcacagaattagaaaaaagtattctaaaagtcatatgaaaccaaaagatggcctcaacagcctgagcaaatctaagcagaagggcaaagccagaggcttcaaactgtaaggctatagtatccaaaacagcatggtactggtacaaaagcagacatatagaccaatggaacagaacagaaaaccccgaataaagccttacacttacaaccacctgatattgcaagctgacaaaaacaagcaatggggaaaggactccctattcaataaatggtgttggggtaactggctagcaatatgcagaataatgatactcgacccatacctttcatcatatacaaaaattaactggagatagattaaatatttaaatgtaagacctcaagtgataaaaatcctagaagaaaacctcagaaatacccttcttgacattggccttgggaaagaatttttaactaagtccccaaaagcagttgcaataacaacaaagattgacaagtgggacctaataaaggtaaagcgctttggcacagcaagagaaatgatcgacagagcaaacagataacccacagaacaggaggaaacatttggaaactatgcatccaacaaaggtctaatatccagaatctataaggaacttacacaaatccacacgcagaaaccaaataaccccattaaaaatgtggaaagaacatgacacatacttctcaaaagaagacatacaagtgaccaatgagcatctgaaaaaatgcttcacatcacggattgtcagagaagtgcacatcaaaatcacagtgagataccctctcacactagtcagaatggcgattaataaaaagtcaaaaacaacagatgctggcaaggctgcagagaaaagggaacgtttatacattgttggtgggagtgtaaattagttcagccactgtggaaagcagtctggagatttctcaaagagcttaaaacgagctaccattcaacccagtaatcccattattggatatatacccaatggaaaaaagaccattctaccaaaagacacacacactgatatgttcattgctgtgctattcacaatagtaaagatacggaatcaacctaggtgcccatcagtggtggattggataaagcaaatgtggtacatatacacgatggaattctacgcagccataaaaatgagcaaaatcatgtcttttgcagcaacatagatggagctggaggccattatcctaagcaaattaatgcaggaacagaaaaccaaataccacatattctcacttatgagagctaaacaacaggtatccttgaacataaggttgggaacaatagacactgtggactactagagggggtggagggagagggctgcgggttgaaaaactacctattgggtactatgctcactaccggggtgcaatatactgatgtaacaaacttgcacacataccccctatatttaaaattaaagctaaaattttaagacatgagtatcattctgatctaagtttcttgagttcttcaaagaatcattcattttgcattctaagaaagcaatacccaaagaggccttaaatgagttttctttgaataagcgaaagcagaatagtgtgacaactcataatttccagaaattttggtgggtcttggaggtctggggaagagaaaccttactggtaatctccttatttcaaaaagggaaattcttaaaataaaaaagggggtttccttccttcctgtatttctggtactgaaaaagacagatcttaatcttcactgagccagctaagtattttcctccctattcacctaaacccaggacataatctgccctctgtagattatggctgtgtgaattttaaaggaaatagtgtaacctatgttgtgcctacacatgtttctgtcatatgaatggcagggcgtaatattaacatgaaaggaatttgaaagcatgttctatgatcttttcctcaaagggggagccaggtcagggggagtaaaggaaaaaggccttagctgggctgctgcatgggcagtcggaacgtttttggaatatttagaggagaaaaaatcacctgcagcgaggtggctcaccagcctagtggggctcttggctcctggcaggttgctgccttccgtgcccaccatggctcagggctctactctcatctgtgccactctggtacccacagccattatagcaagtatttttctatttccactcaaaaattaaaaagctctctggcaaactcccgacattgagctgctgatgtgagtggtcccagcggttagtgtgttggttagaaagttgctatgccagacaggtttgccctggactctcaaaccctgtattttcatgaactgcttctttttttagtcctttctgtagagtgccaggtttttcaggaatgagtatatcgtgttttagcagtgacacttttcttattagttgttatctttcatcttggtctagattgttgagggccttgccaataaaaggaaaatcattcaaataagaataatttcaataaagccaagatagaaggttttcaaggacaatcatggcctgaagatacagtggcaataaaggtattttgaataaagtaacacccacggactgggcatggtggctcatgccttaataccagcactttgggagactgaggcaggcagattgcttgagttcaggaatttgagctcagcctgggcaacaacagcaaaacctcatctctactgaaaatacaaaaaaattagctgggtgtgctggcatgcgcctatagtcccagctactcgggaggctgaggtgggagaatcacctgagcctgggaggttgaggctgcagtgaaccaagatcacaccactgcactccagtctcgacaaccagagtgagatgctgtctcaaaaaataaaaaatacaaataaaaaatttgttaaaaaaaaaaagtagcacccagcaccaaa

SEQ ID NO: 94667 - DNA, 36183 bp, Homo sapiens
ttgcaagttaaggtggcttttgcctaaaattagtcccctgtatcctgctggtaaaggtccccagatgccagtgggaattttgataggtttgtctccaccaactaacattacctgttctctgactgggagatctaatcctgcacttctgggtgttcctggaatgagggaatcaatgtttctcctgggacccgcccctgaaatggggttgtggtctgaactgggaatgccctcattgtttgagggacccaggtccaggcccccttctcgtttcccgacagtgggggatgccattctgatgaaatcttgagcggcactgattaccccagtgatttcctttgttacagcgaggagagtcctggcatgttttccactatggagggaggggtactgcattataagatcctttctgtcctgagatctggcagcattcctttttaaaatgtccagtttttccacaattataacattttcctactttagggcttaatccttggctccttttagatttgtcaactgctagattagccattgcttgcgctaacattgaagacccatgaagctcagttcctacatcctgacaagctctgagaaaagttttttgtacacctcacaggtgccagtgcacgtttacaatctgcgtttgcattctcaaaagctaaagttaaggttagcatttccgtggcagtggcaagaggaatttgatgcttcactgcctcttgtaatcttgcaagaaactgcgcgtagggttcctgtgacccttgcatgatatgtaaaaaggacagtactgggactccctcttcaggaattgtggcccaggtgtgtttagcagcctgtgcacactgctgataagcagcgtctgggagtgccatttgacgttccaggtctgaataagggccattacccaatagcatatcctctgtaatgtctccatgtccagcaatatggttctgtctagcctggtctgcacacagttcttgccaatttaaataccacgtcagatatgcactagcagacaagcaagtttgagccaagtgttttacatcaaagggtagaagacacatagcaccaaatgcagattctaccaatcctaaagtgaatgggctctgtaccccattattagctacactcgttacacttacagaaataggaaaagtacaaggtcctaagggctccccttagctatggcagcagagcataaaattctttgtattggggtcactatttctgctaccaaaggaggcggtacagatgtttctgcaactggagggggcggtgtaggccaatttttatcctccctctccattttttattttcaattggagctgtgggtgggacaacagattctttcagattttttagactcagcctgctgtccagcagaataataaggagatagcagaagaacagtacgaactagactccaagtggagaaaacagaagaatcaactttaggacctttttgatgagcctgttttaatccttctcctggtctatcccaattttccacatcaagagtgcctgcctgtggaaaccatgggttatgcgtaataaccttttgtggcttctgcaggaggttagttagtgcctgcgaattaacctgagctccagactgtctcaacagaactttaagcaactgcacatgatgtttttcttcaatagacaaattctgcttcatgttaccctgattcagaaaacttcccattccaagtacttctttagagcactgaccttatatcgttcccagtacctctttagggcactgaccttctatctgctgccagcagactcatcctggggtccccgttcatcttgtcaatttcaattcctctgctccagcagagcttcttcattcacgtcttcaaagtccctgtgttcagatgccacgtgtcygacatccttggagtccctgttctgggtcgccacttgtcacctgcacagaccttgggggactgaacaaagggggcaaacatgggaataaaagacaaagacaagagagcatatttgaaagaaggggtcagggggctccttgcttctggtaaacagggggcctgagctttagagcccttcacatttattaggcaaaagagatagcaagaagtggggggtgattgtcggttagcagtttgatttacagcaggcttgcaagactgcagtctttgaacaataggatctagatgtcccagtagataatctcaatgagcatggcgccagggccctcagcaaacctcctggcggcaggcgcagttgtgagtttgcccacatcctgcattcatgataaacagtttgctgtttgatcatatatccttcagtggaatgctgagttggtcacaatccctttggccttttcagctcccaacagatgggtacaatagcagaatggagattgcagggaaacatgccagtgatctcaaagatagaaaaatagaaattatccaatctgaacaacagagaaaaaggactggggggagctgaacagaacttcaggcacctgtgagacaattccaaaatatctaatgttcgtgttaccaggatctgagaagaacaggagaaacagaatggagcagaagaaaatatctgaagaaataatggctgaaaacttcccaaatgtggtgaaaggcatacacctatagactcaggaagctgagtaaaccacaaacaggataaaccaaaggaaatccaacccccatttttcaggttttagaacttcagggagggagtcacttccccttgtcatgagggatgcttatgacttcagactgaaatgattccctgtctcctgttacacaaagagagtgaaaataaatttaatcagttcagaatgatattaaatgaaagtcagaatctcctgctctttctcccagttccatctcttagagtcactcactctttctgttttttgttctggtttgctaagggtgatcccaaagaacttaactacttaacagagttgttaataactaggctatatataaacagaatctaaattaatttagaaaggaactctcccagttacttcaaaaaatcagataaatgcttaataagtgccccttgtccccaggtccaattcatcttaggtctggtggcagaactgatagctacatgctttcctgtgttttcccaaagcactgaggaagaagtggtgcaaatgtgaggttcttggggaacccccatctatataaacaaagcttatatccatggattgagatggccactgtctcaaaggcaggtctatgttttgaaccgatacccaattcagagccatgagagagaccacaggatgaatgtgaggcaagccttattctgctaggcttcagggaaaacggaatccaggaactctctcgcccctggttgctctcattctccatcatttattctcgctgcagtctgattttctctaggtggtgtgaagcagtgtcctggcgactgctggggccctctttttaatttcatctttcgatctccattcttccattctatgagcacagaacctctgattttagttgggtgtgtgtacacccagaatgaagactttattccctagcctcccatgcagctaaatttgaccatataactaagttatagtcaatgtgaagtataacgggaagagatgtgtgcaattctaagtcgtacccttaaaggaaaagggaatgtaccccccattcctcctttcccccttcccactagctgagatgaaaatatgttggagagccaacttggaccatgcatatgagggtaggattctaaggatggggagccacaagtagaagaaggatgagtccctgggcagcctgtgaagtcctacctgcactgaaccacctgcctctgaactgttacatgagagagacagcaacttcagcctcttttcagccacagttaatttggttctgttacagcctgtattcttactacattaaaatttccaaagcagtcacgagctcactgagattttaggaaaggggacatagatgagggttggggtgtcaaaaaactgtgaggtcatgtttaaaacactacaggagctggtatggtttagttctgtgtccccacccaaatcttatcttgaattgtaatccctataatcctgaggtcaagggagggacccggtgggaggtgattggatggtgggggtggtttcccccatgctgttctcatggtagtgagtgcattctcatgagaaatgatggttttataggtgtttgacagttcctcttcacatactctctctcatgcctgctgctgtgtaagatatgcctgcttccccttctgccatgattgtaagtttcctgaggattcccagccatgcagaactgtgagtcaattaaacctctttcctccataaattacccagtctcaggaatttttttttttttttttttttttgagactggttctcactctgtcacccaggctggaatgcagaggtgcaatcttggctcactacaacctccgcctcctggtttaagcaattcttatgcctcagcctctcaagtggctgggattacaagcctgtgccaccatgcctggctaatttttttgtatttttagtagaaactgggtttcaccatgttggccaggctggtcttgaacgcctggcctcaagtgatctgcccgcctcagcttcccaaagtgctgggattacaggcatgagccaccgtgcccagcctcaggtattctttatagcagtgtgagaatcgactaatgcagaagcacacacacacacagatcagagaaagattagtcacatgtgcctccttatgtcctagaccatgtcacagtgttctcttgcgttacagtgcctctgcaggtactgctccttctgcctccccttaccccaacacatacacacaattggccttctaaccttggctaaacctggctaaacctggctaactcagggaaatatctgaccacattccagactaagtgaggcatctctgttatattaacacgcccctcacagcatgtattactgtctcataatattacagatttgaaactttacatttattccgtatctttttttacttaaacaggttatttgattatctctcccacatcatacgtagattctgtgaggtcagggactaagtctgactccttcaccgctgtatcctcagcacctagcacagtacatgacatacagaaggtgcttgtcaaagtcaaaataaaatatggagatgaatctctaaatgtaatgttttatttggggaagcgagaatcgcaactcggagcatacacacagatctggtggtctttggtatgtccgaaaaacaaagagaaggctgggcgttttattagaaagggaaatgcattggcactagtaaagtttcagggagctggcaagctctgattggtgactgacagtggtaagtaaaactagtattaggttatggcgggttgtttcagcagttactagctgaatctggtctcagggggacrgcaggccatttccgcagcagttagtggaaatattggttcttggagcaggcgctgcgtgcctccagtgcttttcccctggcccctggattctgattccgttgggcataagaagagtgacccaattcgtattatcaactttcacatgctcaataagaatgtatgcatgtaagctatgggtgagtgaatgaatttggacaactcctcctccagtgaagaaaagcagaacttacaaccttgagccacttataaaatactaacatactaccaccacctgtgcgctgtcttctcagaaccatgctcttcccaggatgagtaactgtgtgcttctaagtggaaacctgatgacagtcacccagtcagtgactggcggaccccctattattactcccattctttgggcagggagatgcttaaccggctggaagcacagaggaagggcaggagaacgaagcaagtcacccggcaaacacagctgtatccggaggcctccgggcttccggaggtctcggggcttctgggcttccggtccctcttccggaggcctgggtttccgggacgtcgcgcgccgtgtggggcgcgcacgcagggctgggcgtgagggggcgtgcgcgtgcgcaggcgacgcgccgaggtactaggcagagccgtggaaccgccgccaggtcgctgttggtccacgccgcccgtcgcgccgcccgcccgctcagcgtccgccgccgccatgggagtgcaggtggaaaccatctccccaggagacggtgagtagtggcgcgcggcggctcggagtacctctgccgccgcgcgcatcggctcagcatgcccgtctctgtctcctcagggcgcaccttccccaagcgcggccagacctgcgtggtgcactacaccggtgagtcgggggcccagcggggagggggcccgggccgcagtccgcagcccgggtgcggctggccgtcgaggcctgggggcccggggcctggggtccggggcgtggcggcggcgaggtccgcatggcccgaggctgaggcctgggcggtggctcaggggcagcctggggcttgcggaacccgggcgggtctgaatcggcggctgtgagcgtcggctgcgggctaggtgttatctgacccgtcagaagcatttctgcaccttagatgctgcccttatgcccgctgcacagatgaggaaactgaggcttggcgaggcgaagtcactttcccaaggtctcactttcccaaggtcacactttcaggaatgggcagagctctggccagggaccattaggaaggatttgtaccatttctgtgcccctgcccccacttccatccctcccttcactggagatgaggacgaggtaattccgagtctgcagagctgctgcttcctccggggaactcggaattcgcccctttgcctagggtggggaaacatcccacttcctaagtcattgctttggcccttcctggccttgggggaagtagagctgcacggccttcttccgtctttttacttttgagccacttacaaatccaaggctcagtgacagcgctggctcaggctgaccgaaagctgcacgtgtaatttagtcccccagctcttctagaagtagagacttttctcgtcctcattttaaagataagcatctggaggctaatacatagtgataatacaagccaaaggaaattttagacacctccccctccccagccagaattcagacatcagagtcgtgtgccttggggctgtcttactccttctccttacaagcttgtcctggtttgtatgggggcgggggagggggagagctgagttggcggagactcagtggctgtgggtcccacaagggtggcagtgattggtgtagccacagttgttgatacgaataaccttccctccccctcctccttcccctttctcaaccttcccaccctttcctctgttccccctcctcctccctcttttttcccactccctctcctcctyttcctcctcctgggtagtaggctgtgggcagttctggccaagttgctcacgaataagctccacctttctcttccaaatcatggaaacatggagggatccctctattgagggaaatgactttcactggaaagaggaaaaggcaactaacatcccccctcccatgcccttttatttctgtggcccttccccgtgggtagaaatgggggcaggaggtagaagttaaggactagaactttaaaaattctgccaaaggaggagttactgaaacccatctttctggggagcaggcagtctcatgtccgtgaaggaagctggaaagtgcttttgatgttttagatagctgtccttgtaggccacagtcagcacctgagcctgggaggtctggtagatgaaagcgcatccttttggtgatttgtcatcggaaggatgaggagagtaaccatttacagtgctggggtgagtgggcagttcattcagttccgcagccaactggggcaaagattgggactcaagccgtgaggagctgccttctgccgcaccccctccccaccctagcttgtacatagccacactagggtgcttggcagcatgtgtcccactcccacgtctgcccctcatgctcgcccatgttctggtgctgccaacaggactggaccccagcatgtaggcagtgccgcacttcaccatgyctctttgtgaaatatccccacacagcatgtctggagccttttcctatgagaacagatggtcatgagacccagaacaccatcagggtttccagtgcctcttgaagtgtgtgtttttctcgcgggtggcacgcacccacatgtttccagagcagcagcaggaccctggcatgcattaggacaaaagctttctttttgatttcgttttgataagccctataaagacgccttagtgagaagccagctctgcctcatgctcacagaatagactgttttcgagcaggctggtggctttgttcccgtgggtctttgtcaccagcctcccaggaataacctgtttgagacctgtgggggcgtgagaggagtgggtaggcactgggagatctcatctgtagcagttaaggcttttaagtcactgggaacagaatccatcttgggggaacatgatcagaaggtggaggttataaaggttccaggggttttcaaaggcagaagcccactgggtcctaagaagggaaaagaaataatcatgatgcctctagttctcatctctgttttttggttgttgttttgtgttttgttttgtttcctgcctgactgcctcagtagtctcctgttagagatttgtgtttgtctgcttctcccaactggtgggtggtggaagtcccctgcatgctcccccgtcccccctcccccctcccccctccccatggccagcttctctgtcttcttttgagtatctggctcagatttcttggctgtgattctgattgttacttctctgagaaggagagtttgagtaaggtgaacactcttgatccagtcagctcttgccaggtgtccactcagctgatttgggcacgggtccagagaaagaggsgtggaagtaaggtggccaaaatctccccttagccatcacaggtgtgcagagcacagactgacctttaccacatggatgctttaaatgccactaatggctgtcagtcaccttgatgtcactctcaagggtccctctggtgacttccgtgaccttctggcagagcacagcatgagcaaggcctcaaaggaatgcctgcactacctctgtggtaccagagggaaaatacaaagttcactatcaccagctaagcatctcctaggagcatgacaggcattgaggtgggagggaggtggtggaaaggtaagctgccaagtaagtgcctttaggagccagggaattctcatggcgcctccctgctgcctccagtagcttcgtcatctttactgttagcttgtcctggcacacagctaggtttagacctcttttacttacttcagcaggccgtgtgcctgccattgtgagagcagccccaaggggattgaaggaatgttttcttttttcttcttaaaaagtaactaactggacattttgtccttgggatcaggtttaagtcaggtatagcctcccggtttctgactgagaaaaaccaggagcccctcaacctcatgtcctcaggaggttgactgggaaggctgctgaggctcccgggacaggtgtggccactttgctgcagcctccctcaagccccttgcttttccttagctttgttcccccctctcctctgctttattccatccactcccttgctaggtatctcttggttggtgatctgatgtctggagggaggctcaccctcagcagagatgcctcagatggcttcccctgacgtgtgctgtcttgaggcacacaggctgtaactgttgggcagggctgcaacaagtccctttgccttcccacagcagatgttttttgagcaacagcagcaagccagrctctagggacatggctagtgaactaaatagacaaagacctgatctggtggggctttgcttatsatgaggagactgatagtatggccatggagcacatcaggtagtaagaagcgctggagagattaaagcagagtgagggatgggaagggaagttggctgcttttcgtgagggtgattggaaaaggcctctgaaaaaaatggcattttaacattcactcaaaggacattggagagggagctacagggctgtctagagtatccaggcagagggaagagctagtgcaggaccctgaggctggagcctgctcggtgcattagaggaacagtaagaagaccggtgcgttagaggaacaggaagtggattgtgtgaaagggtatgtggcaggagatgaggggatggtggagcctcgttggtttttataaaaacgttgcctttttctaactcaggtgagagccaytggctggcttggcttttaatgcccgcccccgcccccccaacccacgctccttctggctactgtgtggacaatgggcttttgggggcaaaggcagaaacaggacactggttgtatcccaggtgtgtggagtgccagctcaggcagtgggcagaagtggtgccaggtggacagtgatccccaaagagcatgtgggttcttcgctgtgttctgatcttgaccctgccatacaacrggctatgagagcttgaacaaattgtcccacagttcccagcttccacatgctgtctataaaatgggagtaacgatgcctgctgtgaagcaaatgcctatcgagactacccagttgtctccaaagtgttgctcttttttaaaaccacagttccattgagcctcactcatcgcagttgttatgtctgtaatctcagtctagaagagtccttacgctgtttttttcttaataactctgatttcttcaaagagagcaggctagttatagaatactccacatctgtcttactgttttctcatggtattgtttaacttgttccctgccttgattttctgaaccggatgtttaatcttttaagtgtctgaatagattccgtttaaacattttagtgtgagtacttcatcctcagcacacatgggaaacatcactagttgtgatgctaaatttgatcttttctgtaaaggtacatttttccctttgcatttagcagtgatctgtggagtgcttaggtagccatagatggtctcttgctcatcagcctttcacctagtggtgtttacaccatctgatcattctcccctgaagaagtcactggcattcacaaagtgttgatttttaaaattccttcattctttctaaatttattagctgttatccttctataagataaggtaaagtaattctttacctttaaataccaaattttatttttattttttgagacagtgtctctgtcactcaggctggagtgcagtggcttgatcatggctcactgtagcctcgacctcccagactcccatcccggcctcccatccggccttctgaatagttgggcatacaggtgcatgccacctgtcctaatttttgtattttttgtagagacgggtttcgccaggtttcccaggctagtctcaaactcctggcctcaagtgatccaccctccttagcctcccaaagtgctggtagtacaggcatgagccaccgtgcccagcctttaattaccaatttttaaaatgaaaaatgaatgttaactgatggggtattgccattcccagtgggggcaagtgacttttyccccctctatttgctttgactgtactgtgggctgaaattttttgtcagggccttaagatcaatgatacccattattctttttgatgctaatatcatcctaaatttggccagtaggagccctttaagctggctccagtacctttttgacaggctcccaccattccttcatccatttctcggtttcactactctggtccaattatcagccatctttcaaagagctctggttcctttcagtggggtccatgacctttttttttcttggtaacagctttattgaatataatttacataccataaattcacctatttactcatagatgttttaactagaacatttttaggcttaaactgatttttatgaattactgaggggtttattgtatccataaactggaaatcatttgtctgccttggaattttctctaaaaatattgtcacctgctgtttcccatggaagaagccaaggttatgaataacttaatcacatagcattcagttctccctttggtgctcatggtgacatttgtttatttttacttctattttttcttctgtttttttgttttcttttcctgctaaaaagcttaaccaagtctctgcattccctcccctggacccctttgattttgaccaggtgtattctagcagtgcagaaagtcggggaggtagaaataaccagttcttagatgctactgtctctttctgttacatttgctcttcctctcccaggagctcaagccaccttggcctgcattcattcctcgaatgctccaagccttttcccacatggaggtctctgcccctttgcttaggtgccaccacactgcccccactccccactgcatgacaggctcttttctttatagcacagcttaagtaacactttggatgcatacatgcatgcttctaattctgcaacaatgcacccatctattttcttagcccccatcatagtcaggatccgtgtagttaaacatctgctctttccccaaccgactgaaggctccaggaggccagacccacactagtgttgttctccaaggtctccccatcagtcttggcatagagtagctattcagtgactgtttgaatgagtggccagttaggacctggcattccctcggtcactcagtgaatatataaggagctgggcaaagcctcaatgttgccctcaagaagcttaccctgtagggagtggtcagttacaatgaaagtacctcaggcaacctacacctataggctagaacttcttggaggaagtgccatttggtcttgggtgtgtatggtgcagtcaggcaggaggaaagcgtcttccaggtatatacacaggccaggaggagaaaagggtacctttgatatttctgtaagtacttgatgaatgtctgctatgtacaagacactgtcctggctaccaagaatttaggagtgaagaagacacagttcctgccttcatctcacactgtagtggaaaagacataataaatatgattaataagcaagactgttgtgtataagctagtaagtgttaaggagggaataggaaaaggttgaggttttagatagattggcaaaggcctcaatgagaaagtgacatttgagcaaagacttgaaggaggtaaggatgtaacctatgtgactgtttgagcaagatcattttaggcagagagaacagcaaatgcaaaggcccacgggtggaggtatccctggtgtgtatgtagaacataaggaaacaatgttctgggactggaaaagtacaagagtaatcagaggtgaagtcagagggatggtggtaggggcggaggcttgacacttcttagagggtcttgtaggccattttaagagttttatctcctgagatgggggagtcacaggagtttttcagccgaggggtagtagggtctggctgctgtgtcaggtttagactgtaggagagcaagagcagaagcagggagaccagggagggagttgtaataatagtctgtaacagaggtccagaactcatgcctttaaccattataccctatagaaaatgcatatttctaccacttccagctagctattgttaagtggtatttcttttgatttttttggagatggagtctcactctgtcgcccaggctggagtgccctggtgcaatctcggctcactgcaacctctgcctcccgggttcaagcagttctcctgcctcagcctcccaagtagctgggactacaggcgcacgccaccatgcccggctgattttttgtattttagtagatacagggtttcaccatgttgcccaggctggtctcaaactccgaagctcaggcagtccacctgcctcagcctcccaaagtgctaggattacaggcgtgagccactgcacccggcctagtggtatttctttctccccctccccatgcgatataatgtggtagtaactcctcttatttatactgtgattaaagtggaaaatggagagacacacccacagggcatgcattctggtctgtgttctttttattgccgttggatcctgcatattcttcccatcatgggccctgcctttgaaaatacacttttggttataggatctaaagggatttagccaaasgttagaagcatttccatactgcgtatgggaaatgtgcttgcactgttggtgatctcaggaaaatgatagtgagagtgagctggttccctctttgggttggcacttggacctttggtcatacccctcactcataaggagttctcagaaccccacttcagggaggttgtgctggaatacagccacagagacccagaaatggaataataagaatgtaagatttgaatttgtatcttttgcctatctaaatgtagaatccctttttacccatcatgattgagacaagtgggtagttggtatgctaacataaaagtgacatggcttctgtaaacatttgatttcaaactctaacataaatcatttgctaaaggactatgtctttatctttgaggatggctctgctagtggagtttcccatcatagttcttgcaaaaaccaatttgaccttttttaaagtagagcaaagagtattgtgagaacatttaaaaaccaaacctttccagatttttaagatttctttctctaaatgtagtctcccatatgattattcactagcaatagttttttagtgacttgcctttattgagtctttcccaggagtcagctagaaccgctgtttgtattcacactcattttattgatttacatactatttaattacattatatttacacagtaaatatagctaccataaatggatttggggacaaacacagctaaccactcctccctttgtgaacacagaactcatatgggaatgaagaagtgatcatgagctagagactaaagcatgaggggagtgctcttcactatgctggggtacgaaggctgtgagttttatgagtctccaagtaaggcagctgagtaaaaggtggttaagagaacttctgtgtctaataagaagagggaaagcaaacagctaaaccattagaccttgagccatacgcccatctgggaatgttctgagtggcttcaaatgcaaagctgcagaaaaatactggctccccctacytccacccattcaaccattacacctttttttttttttttaagagacagagtctcgttctgttgcccagtctggagtgtacttgtgcggtcatagctcactgcaacctcaaacctctgggctcaagtgatcttcccacttgatccactcaagtagctaggaccatgtctggctaawttttttttttttttttttttaattttttgcagaaacaggattggggacatgagtcttgctgtgttgcccaggctggttgcaaactcatgccagtctcaaactcctggcctcaagtgattctcctgccttggccttccaaagcactgggattacaggcatgagcctcctccgcagctggcctcattgtactttttstcattaagaaactcacctgcgtgttgaaagtagaaatccttttccctctccaaactgtaaatggcaaggactttattttattttgaaggtttggggcttaggatattctggttttttgttatgtttgatttttggtttagtttagtcatttttttttttttaatcttaaaacttcccatattttgtccctgtaaaatgctgcctataggaaacactcctgcaaagattcatgagcaactataaactgcattgtgagtcatgagctttcactacaagtagtgaagccataagtctgtagaggtgccttcttcagtcctgttacccagtagaaggtatatggcactctgcccttccccaaagcagagtgccttggaagtgactccatttctattgggttattagtgaaatagtatcccagtggtccttgtgmatctccaggtcctggtcttgagtcttaaccaccgcttcagtggcttgagccaaccaccaggaacacagtctggggatactttgctgcccaggagctgctggccaggtctccctctgctgattccttgaaaagcaacaggaaagagcaggctgctgtggagtagacagacttgagactctctgcaccgtcttgttttktaaacccttttgctccctttccaaggatttcagttcaggaggagacccaggcgaagatgacgtcaacagcctctgcatgcagtcagtcatagctttggcttctttcatggtcttgtgcttttaactggagcacattttcacatttttcttactgattagtaactaaaggtgcttaaagtaaagtttaccattctgggattacccctcatattcttgttaccatatagggaakaaggtctaaatatgaaggcctcatgcttgtccttctggttcttaaaaatcatgcaagtaaagcaaatccaagagtgctcttgagtaccagcaccatacgtgccaccaggacacagaacgcaggccaggtctgtgagcttgggctgcattcagtcaggagagccaagactaaatacttaaaataagaatatggagctattccaggcagtttgttaggcatgagttataggcttgtacggccaggaatgaaattggtcagttctgcaattagaaggcaatgcttgtgatgttttatgctgagtggcctttagagcttaaagactgtcagctgtcttgtctgcactgtaacctcagttgccttctctgagcagggcacgctttctttaggaaattatggcactaacttggcaggtggtttcactgttcaagggctccagctcctggcacaagtgatctccagagttaaaattggagcagctgctgagacttgacttgctgcctgctttacctgttccctccccaaagagaggaagcacttttcattcattgccagtgtgtatgtgggagctaaacatatatagcattttagtaaatgccactgcctactctttttcttttccttttttaaaaaagttactgaggcgtgattgaaatccaatatactgcacattttaaaaatgtacagcttcataaattttgatgtgtcattgtttccctttgaattcacccctccttaccctcctctaacaactactgatatgcttttttgtcagtgtagatttgttgcattttctaaagttttatataaatggaatcatacagtacgttctcttatgtctgccttctttcacttggtataattattttgagattcatctgtattgtcccatgtatcaattgtttgttcctttttgttgctaaatatttttctatatatagaaacatgtatttaccaacttacccgttggtggatgtttgggttagtttatagtttttgactatcgctaataaatctgctttgaacatttgtgtacaagtttttctgtggacatagcctgtcatttctcttggataaatactcaagatcagaatggctgggtcatatgggaggtgtatgtttaacttaactatcaagctgttttctgaagctttatgttatattcccactagcagtgtatgagaataccagttccttcacatcctcactaacacctgacgtggtcagtctttttagctttactcattctaatcagtggtggtagatgcgtttcctagtggttttaatttgcgttgttataataactaggaatgtttagcatcttttcatatgcttacctgccctctgtctttttcaatgaagtatctgttcaaatctttagcccttttttattggttttcttaattgttgaattttggtttgttatattctggatataagtcctctatcagatatgtactttgcaaaagttttctcccagtgtatggtttgtctttcattttcttaacagtgctttttaaagtactgaatttattttgatgaagttcaatttattcttttatagatagtgctttttgacatcatactaagaaatcttcacccaactcgaggtcacaaagatttctttcctatgttttcttctataaatttgataggtttagtacttaacatttaggtctaggatccattttgagttaatgcttgataatggtgtgaagtttttactgtgttatgtgtggatattttgtcatttcagcccaatgtaattttcatctcagacattgtagttttcatctctgaaagttggagtcttatggttctcctctactaattctaacatttgtgttagttctgggttgctttcaattgattgataagtctcctcattgtgggtcctgttttctgcctctttgcatgcctggtaatctttggatgccagacattgtgaattttgccttttggggtgctggatatttttattcctataaattttcctgagttttatactgagaagcatttaagttacccggaaacagtttgatgcttgcgagtcttgcttttgtgatttgttaggtaggtctagagctcagtttagggctgattatttcctactataggcaagatcttcctgagtattctgcccagtgctttgtcaatcatgagcttctccagtttgaccggggggtagtaagcactaatcctagccctgtgtgagcactggatactgttcctctaagccttttggatagttcttttcctggccttgaatagtttgctcagatacatgcactgagagggactctgctgaatactcaaagaggaccctgcagatctctggggatctctgtatagctctctcctgctggtactgtgtcctatggactctaggtgccttgagctccactccaggtccctctccctggaaactcccaaggatatagggctgcccttgtttcccatgtctcaggatttattgttcttcattacagatgtctggtgtcctacaaaccatcgttgtagctattttgtctaggtggtttttaggttttagtggactttttgtagggaggaaggggttggttggttggttgttggttgtttcatgaacaaatctgatccttgtcctccaccgtgaccagaaatggaagttctcactatctgttttgacattacagactgaacagcataattcctacacatgcacactcattccagcttaacaaacactgcttccaccttctcccccaggctgacaacttagggccatagataagtggcctgttcctccccactggggaagccctccttctccttgtcctrtagcttgtgccagttgtgtgacacccacttaatcacataccaccccacccatttcgggggattattgtttagctttcggactcgattatgggaaatcctctccttggactcaaggaaccccaacatcactgccaccacccaaccctgccctgcgaagatttctccttagaaagtagatgagattgacagttggtgactgtggtctgaaattctggagcaagtctcatgcccctttcccagggacaacagagcatccaaaatagcataggaaaattaagatcctaggcaaaggtcctgtttaaagctcctttacttagaaatcctgcttcctggcttttatggttttaagatactagggagaggtttgcccctcagtgtccaagataggctcaggagagctggggttagacaggcatcctcacatagagccactgaagaacatacacatctccatgctggctcagcagcagcagcagcagcagattcaggctgtgtcctgcctagtgctcctagcctggtaccagtcagatagatagttgaagtatctcacctcaggcaaagcaacattgatacattgatgcatgtagtgtctggaggttgcttggcattgcatttgatcaggaataaaaaggaagtttagggagtctgtctcagtaccctgtggctttcactgcaatcaaaatacgatcttgcacaggtcagagccgtgttcaagtttggcaagaaataaggctaattttttataggtataccgtactttccaaattgtgggttatgaaccattaatgcatcatgaaataaatgtagtgggtcacaatcagcattctttttaaaaatgagaagtatatgccatgtagtaacttacatgtaaattttgtttatacacagacaaaatgtgggtgtgtactgggtcctgacatgagacactgttcccattgtcgcggatcagggatagttctttgtggttttagttgttgagttctgtttctttgttattcctttcgtggcagcactacattgtagcgtgctcactaagtgtcagaggtttacctcacgccagttgtgttcatttggctgcaggtaactgaagacccaacctaaggcaaagcagacttctttatttttktaagacttcattaagagcagtttcagattctcagcaaaattgagaggcatgtacagagatttcccatatatcccctggtcccacacatgcatagcctcctgttatcaacacccyccactagaatggtacgtgtgttgcaattgacgaacctgcattgacacatcatgatcacccaaagtccatagtttacattagggttcactcttggtggtgtacattctgtgcatttggacaagtgtataatggcatgtatccattatatatagtatcatacagaacattttcactgccctaaaaattctctgtgctccatctgttcttccctccctctacccctgactcctggcaatcactgatctgttgactgtcatcctagatttaccttcaaagcacacttttaatcacctcagaacatgagtcttgagggaagtggtttggggctgattcagagcactggaatgaccaccttgtggtacgcctggccttctgatagtcacagggtgactgccatgctccagacatcttatcctcacacagcattcaacagggagggcaggaactttcttcccgagtctttgtttttctttttactaatgaggtgggactttcctggaagatcccagtagacttcacagcaggtaaagtagtgcccaaactgacccgtataggggaagggcttggattgattcgagttcatctgctgggccaggctgttgttgctgtcgttgctcctgggaagttgttgtttaattaggaaggtgagggtgccacacagccttgcttccaggtggcccctctgggcatgtttttcttaaaataacagaccagagagaagctctttctggttttcagtctcctttgtggctcacaggccctgccactccgtggttctgaccttgggtgggttactgagccttggagtcggtttccttatttctgttacaagcagtctcacgagggtggatggaaaggctccctgcctggccagggaatggagaatcatagctgttcattgcctgctctcacccttacctctgaggttggttgggttgggttccatgtaagaagtgcagcttgaagtgggctaaaggcagtgtgtttattgggtattgtggagcctggagacctgtttttctcccaggtactcatttatagagaactgttcaagtcctgccattagtcatttctttcatcaggtggtgactgcattctggtaaacgaatgagctaaatgcataccccagctcaccagttctggggcaccagttccttggagcaggtaccggtccccaccctcctgtctacctcttagtcctcagctcccagctccaggcttcaggcagcattggtacccattctgccccaggacatccgtctctactcctgctctattaagataccaccacccaacccccacccgtttcttactttgttaaagtccacatagtccagtagctgtgataacactgccaattcatctctgcctccccatcctacttamaaatgttgacactgttttttaggttgggatttttgtcaggattttctttttttcctaaactcttacacaacagaactgtaatgtttttatggatcttctgagtaatgaatgcttagaaccatggtgagtgcccaccctcagtcttccagtaaaatcagttttgtgtccattatatgttaaccactggctgaccctccaatctgggatcctaattagagaattctcaggaactcagtgtcagctatcacaataggctggcagtggcttcctgagaaagcaatgccgatggtgtttttgaaaaggaagttgcagatatctattgcagatgtctgttcctcttttctcatagcgtctctggagttccccttttattggaaggcgccgtcgtggcttgtccagcttctgggaaactggaataatagaaagagcatggtatttgggtttataatttataacgtagttttactattttactaaattataaatttactatttttataatagtaaattttactatttactattttcacttctccctgtctgcctcagtttcttcatctgtgaaatggggatagtgctgtggagaaagaattgcattcgttcatgtgtggaaagcacctagcccatttagagtaactcagagtggaaccactggccacagagttgctagcagttggctgggtttactgagttaattcttgaagggccaccactgcaacctccttagtattcctgttctcttcagtcatctctgttacaaagtattagctgtgcaaaaatgagcatgggttgttttgtggggcagcattggataaaataagtgggatgaatgctgcacaaattctttctttcatttctctatttcagcctaggttggtttttactttcccaggaaaattatgacaactcaggaaccagcctacaaggggccagctttacgccccaggttcccctgttggtgtgagacacttggcactagaatgagggtgaaagcttgccttatagcttcctcttaccacatcccatagtgctgacccacagcctggagagcagcaatgtgtgtaggtcacaattagtgaaccacagaggagcccatgggggtggcagatggtggagggggatttgcctgcactgaacaatggaggagcaatatatacacacattatatgtgaaagatgatgggggattttgggaaggaatattgcttcttgcactgtgtgtgacttctagacatagtgtgcacctcgagggaccacagttatttttagctggggagaaaatccacggggtgctgggagagtcagggcaggaggaagtttatactccccatctccagaagaaggtggactgccgctcatctctggtacgcggggtccttttgtagtcgagttattgcttggagtcagggaagagcattcacaggtctggagtaggactgtcgcaactccttagatgtccagtgaggtcacaggaaaccctccctagatactgcagttcctgccagactcttcagcactggcatctctgatgagtgctctgctgctggtttctgacttgtcttgtgtcattactctgctgctcatgttacagtsgtctttttcacagggatgcttgaagatggaaagaaatttgattcctcccgggacagaaacaagccctttaagtttatgctaggcaagcaggaggtgatccgaggctgggaagaaggggttgcccaggtatgctctctcatttgttttgttttgctttctagtatttaccttttatatttttttataggtggcatatttatacggttcaaaaataaaaaaagtgaaaagtctcaccctcatgccatcccatctgaccaatacccccacaagaagctcctgttgttaatgtttcttgtactgtggtttaagcacatataaaaacataacttttttcttgctttcacacacatactgttttgcagtttactttttcacttaatgcatttttgacacttgcaataccactacataaaagaggagtaggctgggcgcggtggctcatgcctgtaattccagcactttgggaggccaagatgggtggatcacctgaggtcaggagttcctgtaatcccagcactttgggaggccaagatggatggatcacctgaggtccggagttcgagaccagcctggccaacatggcgaaaccccatctccattaaaaatacaaaaattagccgggcgtggtggcaggtgcctgtaatcccagctacttgggaggccgaggcaggagaatcacttgaacccagcaggcggaggttgtagtgagccaagattgtgccattgcgctccagcctggatgacgagagcgaaactccatttcaaaaaagaaagaaaaaatgaggagtaagctctgttacagctgcctagtattcgtttatgtaagtgtgctataatttacttggctagtgccctattaatgagtatttgagtcatttccagtattttgctattataaacaatgctgcagtaactcaccttgtacagacttcattttccacgtgtgcacatgttgccataggacttactctcagaagtgggatgaggggctcaaaagctgtgtgtagtgtttttgagaggtcttgtcaagttaccatctctaggggttgcactctggactgccaccaccaggctataaaggtgcaatctcctcccagccccagcatcacagtatattgttaaatctttggcctctggacaataagagtaaaacatgatatcagtggttttaatttgtatttatctattacccatattgtgtgagaccacttctgagwcgtcatacttatggagaaagtcatttcgtttgtcttgagtgtgtttcctaatctctttcctccccatttgtggaaacagcttttgttctgccaacactacaaaattcccaggagacaatagggacccagggttgccaaattttagttggattctgtctttccatcaaacctaggaattttttcttggctctaaccaggtaaagggatgtttttcagtgacctgagacccaaggaactttataattaggctctgcatgatgggtaattagtctgcttccctctcacccaggagaattagaaatttaaccaagatgaaaagacagatttctgtctctctcttttccagaatacacattgctctacttcctctataaaatatcactgatttatctccaaataaactgctcaactttcaggaacttgaagccatcccactcccaggtgtctgggtttctgttcctgcagggcagagggttggcagtgtgaggaagaggctttgtagtttacttcccttgggaaaccttgccaaccatagctttttgcctctgtctccctagtctgtctggctcttggatctgtagcccatcccccatctttcatgccagccattgttcataccacaacccatcttctgtgactgctccagcattggaacaatcactgcgttgtatgtactgagtgctgtatctgccatcgagatagtgttatcggcctacttcacttcccaggcttggagaggcatggtcgagtattggacagatgcctgactccccctttaactggtattttggggtcagtcacagccctgtcatttgtgagaagtctgggtagtttgagatctacataaaatatcttttaaattcttcatagcatattttttcaccaagtgagttaaaaacacaggaagaaggggagattgacttgtgacccttttcctttccttttgatattgttttggttttacatgtttgcaggcgtggagtcctgcctgccacaaggaccattttggcagctttctttcatccatcttggacatcttttcatgttaatacatttaaagccaccactatatgatttctcatgactaatccctggtgtggatatgcctatgaaaccactccttctgtgatggacttttgagttgttagcagaatattctggaaatagaattgctgagtcaaggaatatgattgttttgaattgtacaaggtaaagccatacctcactatccttaccaccttggtccaacatgtcccagcttctgaggggagcaaggactagacgcttcacagcctggagcttcctctttattcatcctctgtctggtggagttggaaagtcgggaacatacacatggagaccaaaagcagagataagtcaaaggatggaaatactgcagagaacctgctcactgttcagaaagtagatattttatacttatttgtgtatttaatttgaaactgaaaatatacacaaatatattttttaaagtagaaatctctccttactggtcactcactatccatactgttctcctcacagcaaatgtctggtatgtccttccaaagatgttttctgttgtaggcatatcaatattttcacaaatggtattcagtaaatgctattttgtagcccagaaaatcatattgtcttttttgaagttttcctatatgggtaaaagagtataaatagaaaaaatacagaaaaaatagactaccctcaagtattacttcctgtgtatatatttttttaaagcaaagttgagtattcctttttcaagaagagcatagatggcacttaacatgtcctttaagtgacagatcactgaaggggactaggtggtgagacatctggaatgttacctgcctagcattagtcattaagacttgcgtagaaaggttgagggcctgaccgttctgagagtcaggaggggttttgaactgccattgggcttcttggagtgagatgcaggggtgatggaatatgactgccaacctccaagtcctgcacaaggaggtggtgatgcctgggcagctgcaaagtcactggaaagtcaataccatcctggccaaggaacacctaggtaaacagctctttttcttacagagacagttggggcatgtgtccagctgagtctgtcttccttgttcttttcacagatgagtgtgggtcagagagccaaactgactatatctccagattatgcctatggtgccactgggcacccaggcatcatcccaccacatgccactctcgtcttcgatgtggagcttctaaaactggaatgacaggaatggcctcctcccttagctccctgttcttgggtaaggaaatggaatactgaagggcccttcactgcctttgctcctcccatgttatgcccagcgtttgatgggtagcagagagaacaaaaaacaccacaaggctatttttccccctgcattctttctgtattgagtatcctttcagtgttattagtgtatgctttgaatgtaaaaattggtcaccctaaggaaaggaattggcatgtgtatgttcccagttcaactcatggagatggcagctgtttaaatgtttttctatgyagtttataaattaaaactgaattgaggactatggaaatgtaggccaaatttgtagtgccaacattttagttctttggaaataagactcttaatgaatgactttgttctaccctgtgtttctagargctagagggggaaaaaaaaagccctttggatatgaatatcatgtcctagcttctgcggctctctcttcactgtggtttgtggttactgcctattagatggtatgagggaggcattcctgcatcggtccacctgctcagggtccacacccaggacacttgaggcccccaggccagcttatcagtgagtgaagtggaaaaatgaagccagaggatgcttgtgaagttgaaaggatgctcttagatcagacagttctaggaagggatcttaggggcctctgcatcagctttattgtgcaacagtaaggaaacagggccagagagaaaggccttactcaaggtcacatccaggcagtggcaaagtaggaccagagcccctgtttgttgattttcccctcttccaccctcatttcttaggaactaaactcagtatcctagtagcacgtaacttttcatgtaagtgttagaatcattaagtacatgaatgctactggcttccttccaactggccccagacctttttatttgctcccctcctgccataggaaccagagggtcacagccaaggcctgggtgaggacacttttgtttgaaagccacaacaaatggctgccatcctatttgtgatggcagtcagagctacttgtaacctggtcctgttgtgcacatctgtaagtggaggggctttttaaactctctgtttgaaccacacacaccttggtaatacaggcctggttaagtttgataactggtttcttcacctgtcattgctactgggagggaatccctggcactttacagggcctttgtctgcccagaggtctgcacctaggccaaaatccctttcctgttctttgagagctgagtcattttttgaacataactgtactcgagggagccttggaattattttcctggttgggaacaggctttctgtaaacttgatgaggtagagggaggggagagagggataaaggctacaagtcaccccgagtaaccctcccaacccactgccaaagaatgtctcagcttcttgcaagagtctggaaggaaaatccaagggcaaacccagaaagttttaagttgagtgaatgaatgaatactggagatattttcccagtatactcaacattatgaatgaccagtttattctcagtctggactgcacatgagagtcacctgggaaatttttaagactttcctgatgcccaggtcaaaccctaaaccagttaatcataatcatgggagtggaacccaggcattaagagttttttaaagcccccaggtgatgcctatatgtagcacagtttgagacccaatgatagtggggaactgtattgtcagcagcatgggtggctagccctcctgctgtcctcagcaaggcaaacttaaccttagattaaacaaaacacacagatcaatttaaggagaaagtttgtttcacctgggacccagcccaagtctttctggctgtctccagctggaacagaagtggcttggtctcagactgctcagctgttggggaagggatttggcgtggcagatggcatcgtggctgtcgccactgcacacaaagaacactgagttgctggaaactcacagattttctgtccccaacagatctgccatggagggatctggtgcctccagacatgtgcacatgartccatatggagcttttcctgatgttccactccactttgtatagacatctgccctgactgaatgtgttctgtcactcagctttgcttccgacacctctgtttcctcttcccctttctcctcgtatgtgtgtttacctaaactatatgccataaacctcaagttaytcattttattttgttttcattttggggtgaagattcagtttcagtcttttggatataggtttccaattaagtacatggtcaagtattaacagcacaagtggtaggttaacattagaataggaattggtgttggggggggggtttgcaagaatattttattttaattttttggatgaaatttttatctattatatattaaacattcttgctgctgcgctgcaaagccatagcagatttgaggcgctgttgaggactgaattactctccaagttgagagatgtctttgggttaaattaaaagccctacctaaaactgaggtggggatggggagagcctttgcctccaccattcccacccaccctccccttaaaccctctgcctttgmaagtagatcatgttcactgcaatgctggacactacaggtatctgtccctgggccagcagggacctctgaagccttctttgtggccttttttttttttcatcctgtggtttttctaatggactttcaggaattttgtaatctcataactttccaagctccaccacttcctaaatcttaagaactttaattgacagtttcaattgaaggtgctgtttgtagacttaacacccagtgaaagcccagccatcatgacaaatccttgaatgttctcttaagaaaatgatgctggtcatcgcagcttcagcatctcctgttttttgatgcttggctccctctgctgatctcagtttcctggcttttcctccctcagccccttctcacccctttgctgtcctgtgtagtgatttggtgagaaatcgttgctgcayccttcccccagcmccatttatgagtctcaagttttattattgcaataaaagtgctttatgccggcttttctcagctctgtgtcatggtggttattttcaggtgcctcccctgccatttggtgcagggggatggggttgggcagggtgaaggagggtggcagtggggatgcagtttcaagattgtgtcttggcagaagaatgcagcagtgaacatccttcctcactggctattaacgggttgggggtcagaggagggggaatgtggggtaggtttgcatcaaaggagctgcctgaaagggcaagctgggatagtcagggaacatcccctcccctgttaccaaatgtttattaaatatgtgttctgggtagagcactatgctcggggttcttgggttacagaaaagtgggagatacaacacatttttgagaagtgagtcacagtccacttggagatgtgctacaagcaactgcaagcaaattaatgagatacgaagagaagactctgattttaaattggtattcctcagtaacatttaatgtagaaagacagtcctgtggagaggctgcgtggttgcagtagcttctctggaccctgccctgggtgccaggaacactttgcccttactgagagttctagagaccgtcaagaatgctcccacacctttctagacaccttccaaaattgcccaggttgagaaccattgattttaaaaaggaaattattcaacagcttgcttaatggctttctaagttctttttgttaatttatggtttttagagtgccagagtcatattccagggtcacatcttaccatccccaacatttttataaaaattctcaaacaacacaaagatgattaaaatgaacacctgtatacccaccacctagattctatcataaacatgttactgtatctatatatcacctgtctatccatctgtccatcaaactatccattatgtctcttcagagtaaatggcagacatcactacaattcccccagtacgtgtcattgactagactagagagtagtgtttgtttacacttttgtgcccctgccaggataaagaacatcaccataccagaaaattccaatatggccttccccagtcaaccccaccccgcccttggaggtggtaattgtaattcttctccaccataggctagtgttgcctgttctgacatttaatttaaatggagtcccacactatgtcctttcgcacagtcagtattgtgccttcactcaggcatatgggaagctgttctcactgaacttggcatttcagggaaatcctctggattggggatgggagtcctcagagatgtccacatcctaatccccaggacctgtgaatgtgtcaccttacatggcaaaagggactctgcagatgtggttaggtaaggaccctgagataggaggattatctgtatttacctgggcggatgcagtgtaagcacatggatccatataagcatcagtgaaggcgacgtgagggtggacagacttttgaggatgctaagctattggctttgaagatggaggaaggagagcaacaagccaaggaatgctggcagcctctagacgctggaaagggcaaggaaacggattttcccctaggactcctgaaaggaacacagccccacccataccttaattttagccctgtgatgcccactttggacttctgacctccagaactgcagaatttattactaaggtgataagttagtgttgctttaaaccatttgttaacagcaacaataggaaactaatacagggccaacttttttttttttccccgagatggagtctcactctgtatcccaggctggagtgcggtagcgtgatctcggcttactgcaacctccgcctcccaggttcaagtgattctcctgcctcagcctccctggtagctgggactacaggcacgtgccaccacgcctggctaattttttgtattttaagtagagatgaggtttcaccgtgttagcaggatggtctcgatctcctgacctcgtgatccgcctgccttggcctcccaaagtgctgggattacaggcgtgagccaccatgcccgccaatattatttttaatgtataacagaataatgtcagggttttgttttttttttttaatccaggatcctaccaccctaacaaacaaatccaacttcaattttttttctccttcctatttcttgccctaagcacttacaacgtttagctttaatcacaacgtagtacaaattttgcatttctgcttttttccccacttgccatttttatcaggagtatttgtccctgttgccatatggtttttataactgttttaagagggctgctaagtaaattataccacatgaacattaaatttacttaactaccttgttaaaggataatttttttagaagttaaaattatgactcatacaaatataaaagtaacatgttaaagatgattgtatttaacttgttaattattgagagaaccagtaggacactttaattggctcaaaggagaatccaaagaacaaataattataagcctagcaggaatgctgaaatgagtttgcttcgtagttacaaaactggcaaaattggctgatacctgcagaacaataatcagttatattccattggtcacaatttgcatttctatgaacaagaatcatctgcattatcagtttcccttaatttacgtaattgtaaagtagctcaaaggcagtgaaatgaaagggaatcaactcagaaaggtgggctagattagacagaacactcagtaattggaggcaggggtgggggcagtgggcaagacctatttcaaagtccttcacagtgtttcctgatagcctgtatttggatagctgggttatgtccagttatttgcttttattaaatgtcaatacatctttgaacatttttttctttcctaaatacctaggttctataagatataatactgttaatagtaggggatccctagggtcaaaggagattttgacttttgattagtgttgccaagttgaccagagttgtataagccttttcccatgccaaaaacaaaaacaccatccatgtccaatggctatcacttccatagtgtcctaaaaaaaatctttaaaaaccttcctttctccagtggtcctctgctatgtcgtgaatgtgtctcccaaagttccatgtgttggaaacttgatccccagtgcagtgggtgtggggaggtaggacctaatgggaaatggttgggtcatgggggctctgctctcatgagtggattaatgctgttattatgggagtgggttcctcataaaaaaatgagttcagccacctattggcctccagccctctctctctttctgcccttccaccctccaccatggggtggacagcaagaagctcctcaccagatgccaacaccttgattttgggactccccagcctccagaactccatgagataaatttctcttcattataatttaccccatgtattggtatttttattatagcagcaaaaagtagactaagacacctttccaccttctcatttcttctcatattcattggccagaattaaatctgtggagaatttgacctggatcaatcaagacccatcaccccagggctggagaagggctcagactcccctaaagctctgagccctagagcccctgaacagattccgttaataaacaagaagcagggggaccagtggacccagctagaagcggtttatgtggctacttactgtattttctttttttaaatttccttttttgttttacttttgaaatgcatgatggttatactacagtcctaggattcaggaaaacttctaattccacatctaacctttgctaagggttagatgccaaactaccttttgtttgagtttttccatccattaaatgaacttgggatgagagtgggaatgtgggtggtcagagtgaccagatgaactttaagataccttgcatctctaaaattttaattatttgaaagttaatgatccatgtgaaaaacttaacttagctgtggcaaccacataacaccaccaccaccaccccaccctaccctctgtttgaaatgcttgttcttcagtgccgcaaagaaatagcacttgaacattaatttcttcagcaaggtcatttttatactttctgcagaaagggtacactcgccagcagttttgccacgagagaacaccgaacaaaggagacagggtcatttataacttgacaagtccactttactgctgtgtccagtttccattggctggaacgggacctcacattctgtatttgtcctgattggctagcaacttagacctttttaaaagaggcaaaggcagaggagaatgaaggaggaagtaacttgtggaatgctgagaaaggtaaaaacaccttcagataaggaagaggaacaggctatgacctaatgcttgcttggaccagtataagcattgccagggcaaataggctaaattgtgggagctaagaacataaagtacattgatttctttattacggctagcagatatttaagaatgttagcacaggtctttgaataagttttgctcctaagagaagttactatttattcttaattagacagggaggaaagtctttgaagaggaacctcactttactttttacacccctaagaaccatgatgatagactgcaaaaaagcatcccatcaaccatcactttttccaggaaatggctggccacagaaaactctccgcccctttcctcttttgaaatgttcccagactgctcacctgcctccttgaagctaatcaagtcaaatgtacttgaagaccactttgtctcttggcttgcttccacaaatcctacccttatatgacatttgccaagtcaacactgtcagtatttctcctttttactctataacgtcttaacacctctgaacacttaccaaaacaaaggtttcagcagaagggttcccctgctgcacgtttatgaataaatagcctttgtcgattttatcttggacttagttttgtctctgacacatgtggaatggatgtctgttagaattctgcccttgccacacctcttgcttcctggataaatgtgggttcacttgggttgatgaccttgggctacactggcttcttcagaacccctgagaagcgtgtagggattctcattcagacctctagaattgagtgaatcagtgaagggcagctgacaccaaaaatgcattaaaatgtcaaggccggcagccctctagcttctggctggagtgtgtgatgatttcgtctgaattccctgagttcaaggcatgcagtgggcagatcgactatgggcccatcagaggctgagtttgcagcagcagctgtcctgtacagcatgcagcaaaacggctgtcagctcttattaggaaggtagaaacatgccagtgggtatgtatgcaggactagtgtatccttggatgtgcctgttactgaccactgtggttctgtttaacattaatttgtatatttctcaaagcatcacatgcccaagatttaggcaagtaaattcagttaaccacagagtatacttttatgcctttcctgtgataacaccattctagatgctaagagtgaatgtaggataggacagaaaagtgctgctggcaaggaccttacattcatgccagtgaaggagacccaaaacagatgggcaaataatgccagccgtctggaagcaatggagtgaagtggccaagtgaagtcctggaggaaaattgttctaggctaagtccctgaagggtggtgagtttggggtgctggggaaacagcagtatgacctttagagacagagcaaaggtgtgagggacagagttaggcaggggccaggtgaggcaggctattacaatataagtctagtgagcagtggattccagcaggagaattatgtctatttgttttggggagagtgttttgagacaaggtctgatctgtcacccaggttggagtgcagtggtgtaatcacagctcacggcaacctcaacctcccaggctcaagtgatcctcccaccttagcctcccgagtagcacatgcc

SEQ ID NO: 94668 - DNA, 19979 bp, Homo sapiens
cccagcactttgggaggctgaggagggcagatcacctgaggtcaggagtttgagactagcctggccaacatggtgaaaccccatctctactaaaataaaaaaatcagccaggcgtggtggcgggtgcctgtaatcccagctacccgggaggctgaggcaggagaatcgcttgaacctgggaggtagaggctgcagtgagccgagattgygccactgcactcccagcctggctgacagagtgagactccatctcaaaaaaaaaaaaaaaaaaaaagacattattagactgaccaggaccaataagatgattcagataagggagatcagtgagactagaatctctggggaaggcttcatggaaaatttgggatttgaagacgttcccagaaaggggagcacagtaagctcagacaagaagataggaatgggcacagagtatgaactcatccgttgtcacccctcctgtgctgactgtgacgagttagagaggctgagcagaggagcaaggaaaaagggatgccaggaaagatccctgaacaaggcaacgacttgttgattgcagaggtgactgggtgttgtatcagtttgctgaggctgctgtagcaaactaccacaaactgggcagtttcaaacaacaggcttgtctcacagttgtggaggctggaagtccaaaatcagtgtgggcagcactgcttccttccgcgagctgggagggagactctgttctgtgcatctctcagcttctggtacctcaggcattccttggcttgtaggtggtggtctctgtgtgacttcacgttgtcttccttctgtatgtgtctgtctccatgtctaaatttcccctctttataagggaacctaccggtcatattagggggtactctaatgacctcatcttaacttgagcatctgtagagaccctatttccaaataaggtcacattcacaggtactaggggttggttagacttcaacattttggggaaggatacaatttacccaataatgggtgtgaaggaaggaaacaagccttttctcctctctcttcctccaccctgcatctccatttccctcagacaatgactgatgtggtgggtaacccagaggaggagcgccgagctgagttctacttccagccctgggctcaggaggctgtgtgccgatacttctactccaaggtaagtacatggggtgcacgggggaaattgacaaaaggcacggggttttcacccctgatgggggtcagtggtgttagataccaacttctggtttgtctcatcttccactcccttcactattttctccttaggtgcagcagagacgacaagaattagagcaagccctgggaatccggaatacatagggcctctcccacagccctgattcgactgcaccaattcttgatttgggccctgtgctgcctgcctcatagtatctgccttggtcttgcttggggcgttccaggggatgctgttggttcaaggacaacaccagaatgaagagggtctcacaagacacctgttatcctcttctttcaccctatctcttcccacccccagcttccctttgccccacaaagttcccatgtgcctgtaccctcccctggtctacataggacctctagatagtgttagagagagaacatgtagtggtaatgagtgcttggaatggattgggcctcaggccaggtggtcttcaaggggaccagctaactgatcctrcccttcagagacccaggagttgggagctttcgctccttctccaagactcaggcctgtgggcactctataagctagttgatcttggctctcctgataacagaatccaatttccttccttccctccacaggtttggaacaaactctcccttcacttgttgccctgtagcactacagaaaccctggttcttgggctccactgagccccaggtcagtccccagccctctgggttggcctgctgtcagtgcttctctcactccttagttggggtccacatcagtattggagttttgttctttattgctccctcccagacactccctgtggctgccctttgtgattccctcagatctgccctaatcccgggcatttgggtgggggaatcttgcctttccctttcagagccccagggatctcatctggggaactgtcattgccagcagaggctgttccttcctgcwgtttggagatgtgactcattcattcactcactccaccctgcctctgcatcccttaatggagaaacgggcctaaaaccaaacgggtaaaaagccctgggccatccctgtcttcctgtcccttgtctgcccagttgacacctactggtgacttctagggcactgaggagtgaaagcgcctagggctggagaatagcgctgagttgggtttgtgactcttccctctccctgcctcacaggattgtgactccccagcccctgccctcaaagcttcagacccctcaggtagcagcaggaccttgtgatcttggccccttggatctgagatggtttttgcatctttccaggagagcctcacattcttcttccaggttgtatcacccccgagttagcatatcccaggctcgcagactcaacacagcaagggtgggagacagctgggcacaaagggggaattccgttcagcatgggctctaaacccacagaactgacaaagcccctgcttccccaccccctcctcaggctcctgcgagcacacccccacccccaaatccctccctgttctacactggggacagcagaattttctccccgtcttccccttcctgccattttccctcccttgaaaggttgacactggacaaccttggggcagctgagccctggccgcctcctggctggaaccatgagaaggaagctcagtacttcccacagtgtccctgttgataactgtttttattaactgaattgtttttttcatggaccaaacttttttttgtactgtccccttattgatgttacccagttttaataaaagaatcttctgaaggatgggtcctcctacctactgtgagagagctcttccctgagctcttcttccttcaataccattagccacgcttgtagtgtttgttcattttatttgacaagtatttattgagcacctgctatgtgctagttgtgatgctagacacgggagataaagtggaaaatgagatttctacttttgtggacctcagggtcttaccttaagagattgctgtctgccccagtggtccaagcagcctagttgctggttgggattattgggcttcaccactggatcttaagagccctttcccgacttgctaggcaggtactaacaggttggtggcagtcattttcccccttgtccatctgagctccccagagcacttgttggctggagtgagccatagatgcccgtgatcccttaggtttgacgaacctgagccgcctttggaggagtttcacttcttccccagggcttctgtttagatgtgggcaggatctggacgaccaaagacatttttgctttttgtgcctgctactctttttttttttttttttttagacggagtctcactgttgcccaggctggagtgcagtagcgcgatcttggctcactgcaagctctgcctcctgggttcacgccattctcctgcctcagcctcccgagtagctgggactacaggcgcctgccaccatgcccggctaattttttgtattttttagtagagacagggtttcaccgtgttagccaggatggtctcgatctcctgacctcgtgatccgcccgcctcggtctcccaaagtgctgggattacaggtgtgaaccaccgtgcccagcctgtgcctgctactctaaggttccgctttcatggttcaaataagagttcagtttttgtttgcctgttttgagatggagttgtgttcttgttccccaggctggagtgcaatggcgcgttctcggcttactgcaacctccgcctcccaggttcaagtgattttcctgcctcagcctcctgagtagctggttcttaagagcaccatggaagttctgtgttgtcatcctcatactgtagacaactagcccctccttggcagagtttggaagacagctcaggagggattcccattagcaatcacttgaaactcgcctgcagttctgcctgcttcccacttggaggctcatgacttttttcctttgtcattatgcaagaatggggtttggaatataggatcagagtacaaccactttccaaagttgtagtttaaaaattatcctttgcctgtttggatgggaacattctagtattgcctgttcaatatatgtaatcaaacccaccaaaaaatccaaccactgttcctactccggaacttggggtttatcagacttgagaagggaaagcagagaggagtggttgggccgataactaggagtggagaaaattgatgtcaaggacattgaaatggcatctgtttttacccaggctaattacatgtgtaatgaatggctgatgaaccattattaatttcaagcaaatctacagtttgctcttgggaaaagagctctagtgatacagataacttcctgtgatgagccgattctgaatctctgcaccctctttattcccatgtaaatgagcacattcttagtctccacactatctaaaatgattgtaggggcaaaatgagagagggaagcatttaggcaaaaacaagggggttattttatgcataaacatccattctttggggctcccatmatttgtgccagggacagaagcatcctttctcttccatcacccgtaatcagtgctcccagctggcagcctggcactggagccttcatctcagtgccagtgcaataaaggagtggtctgtgggaggctgtttctgtattaggtataacattgtgctaagaaaaacagccaactactgatttcatgtccgtttccctatgggaaattactggccatggaaggagaatatggttggtttttcctgggcagtccccggaacttagaaagccatttctccccagtcttgacctcctgcctgcttactcctacccatgggttgcacacagactcccctgtagcccagtgcttgttaccagttgctggccagcaacagcccagggggatggcaacacccacctagccgtctgccaagccaggaggtcagcacatgagcacacagtggtgtctgccctctaggccaaggtgcacagtgttaggagcctcttgctccactctccagatcagcctggaaaccagagcttccctcgtcttagacaaacagatggccgtgggcgatgcagagccctgaactgctgagggtgctccttccattctcgcccttccccaaaaaacatacaccaaacttacccccaatcacagcatctgagaccacaaagccccacggacacagctgccccgggtactgcctgccttccccttttctggcctctgcaaactagccattcacctgatgaagcccctggggcagtaccttggaaacccctgagaggaggagttgaaggaggctcaaagcctttcaaggacagtgtgcactctgcctgcctcctattctctcctgtcctcttaagcccagagtctacaacaaaattgtgtaccgcaattctcagagctctctaactttaacctttcccaccttccctagaacacatttttgggtggggatcatctgagaggcccatggatgagtccccaagatgacctctgtgggtgaccaagacaatcttgtcttttgaggcacctggagtctctcatccttttttgagctgggctgtcctcaaagcaggcccttacctcttatgtggcctcatctttagaggtgggaagtgggcccacatcccccaccccagccctgcagtggagctagcgtgggcctgctggaggacagaactgtggaacagggtcctgtgaggatatgtggcagggttggcggggggatagggggtcatggaggagcctacctctgaaaagcattcccctagctgctactgaagctaaatacaatttatttcatgctgggggacagaaaggagcaagggagagcagtcacctgctccttatctgggctattttcttagcagacctcaaaatgagaccatggtgggaagctgggctggggccaagggaagaagcttgccagcactgtcagccgatgagcccaggagaaaaagctgggcctagtctctgccccattcctgttccacacctgtctgtacccctgtctctcctttccctggctctgccagactctctatctccctgggcgccagcctccccacccacccctggagggcggggcttggctgcacccacgtgtggtggagttaaatgctcctagccggcagaggagctagggagtgtggcactgagccggctcaggcagagacgcggcaccatggctagcaagaaagtctgcattgtaggctccgggaactggtaagcagctctgtcaagtgatatgggggaagggtaggccccccaagacagaggtgggtaggaggcagaatgggtgggaaaggccctcaggttcctgttcagcccctgctgctatcttctatcatagcagcacaggacagacggtgcccggccctctcctgacccccgccctcctgggcagctgcacctgttcaccatgggaaggcgtctccagagctctctatgtgaagagccgcttgagtttgggggtgggaagatgagaagkggggctcccttctctagtagcaaagggtgaggagactgagtctcctttctactgccaggtcactggggactatttgtcatgggagtggaggtgataaggaaggtaggtaggagtgaacagcctggggggctgctgtgagatcctgaggtggggcgctgccccaactcctgccactgttccctcctcctgtactttcctgtgctccccctcccaccaggggctcagccatcgccaagatcgtgggtggcaatgcagcccagctsgcacagtttgacccacgggtgaccatgtgggtatttgaggaagacattggaggcaaaaagctgactgagatcrtcaacacgcagcatgagaatgtcaaatacctgccagggcacaagytgcccccaaatgtggtgagccccaacaccctgcgaagaacagggagaggaagggagggccaggagttggagccgaccttactcaacaggtgcctcctgctgagagggccgcttcaggtgcagcaggacttgggaaggtctcaggagggctgctctgggccctttcctgaggactgaggagaacctatgctttcccctcacaggctcccaggcgggtgggtggggaagggatgggagaacaagttggtctccatggcagccaaagactgggctcccagacttggggtccagtagtgcctgcctccggcactaatcctgttactcattcactgagtgagtagccgacttggaggctgctccttggacttacggtctttggtcaaatccacgtggctctccccacctggaaaggggaagcagggaagagagcagaaaggctggggctcccccttcccagctggggttcctgaggagctgggtgatgaaatcttatttgagctctttcttttgccaagcccaggctgcttttggcctcccgcactgtcccacagccaagggataggagagtgctgggatgaggtttccaggagtcctcaagagcccaggacagctggagggagacagagtggtagctggggggagggagtagagtgtcttattcctccaagttcagtccttctagattcagtcccaaacaagccttcctgctcccctaccagcctcactctttggctcccagatctcctgaatagggttccacaggggctaggggaggtctgccaggcccgcgagcacttggtcacccccacaggtggctgtcccagatgtggtccaggctgcagaggatgctgacatcctgatctttgtggtgccccatcagttcatcggcaagatctgtgaccagctcaagggccatctgaaggcaaacgccactggcatatctcttattaaggtgccagggacaccttcatgtggatgggggagggtgcggctcactgttgtggggttcagggtgggtgaagcaaggagaacagaaaatggcagacgcaggccaagagtttgctggagaaaagagaggcagttggctctggagaggcttaggaaagcagtgaggtgctgggggtcactggaagggaggctgaagggaggagacgagattggtttggaggtcctctcggggagtttcggaggtataaaggaatgcctgggagatatgagaagcgggctggtttgagaagtgtgaagagtagctggtttggagcagtgactggtcactgaatggcagtttgttggggcagtcaggcggggttgcctagggatgtggaggggacccgttgccttggagaagtagactggttgagggtatgtggcaggacagttggtcacatgctgtctggcctcctcacagcaaacttgagctgggttggaatggggcagracctgtcgggagggacacagatgagcaatggatttggaagrgacagaatttctgggcrgaagccmgcaggtgggcccaaagggcacctggcctgagctccatcctgtgctcagrgggtagacragggccccaatgggctgaagctcatctcggaagtgattggggagcgcctcggcatccccatgagtgtgctgatgggggccaacattgccagcgaggtggctgatgagaagttctgtgagacaaccattggtgagagccccctggcacctgcatacacagtgcatctagttgcatcccctccccaaactgccccaaccccacttagccatctctttcccataaggcagagaaaggaaaatacaagcatcagaggtgaaggaggctgggacacccccagggaaggggcttcagggcctgcttagggaaacacagtgatgagccctccctcagagttggtgcagtggcacacctgtggtcccagctacttaagaggctgaggtgggaggatcgcttaagcccaggagtttgagtccagcctgggcaacagagagagactccyatctctataaaataaatattttttaaaaagagtccttccctcaaagccttgccccctcctcactttaggctgcaaggacccggcccagggacaactcctgaaagagctgatgcagacaccaaacttccgtatcacagtggtgcaagaggtggacacagyagagatctgtggagccttaaargtgagaggggcacagaggcagctatggggtgaggagaaggccccaaaggaggtctggctgagctctgcaaggctgcaggtactccaggctctcactattgagcagtggttcccctttcctaccatgtcccatgcatataggaggagctgcagaagcaaggccagggccattcaggccggctgattattcatcatcagaccgtggacccccttgctcctgtcccattttagccccgtgtgggactccccaccctctggctccaggaggtggtccagggggacaaggagatgcccaggctaatgggagacaaaacatccttgacacccagacagactaatggccagaactatggatcctggacagctgttgacttgagggctgtacaatggaatggtcatagatgggaagatcaactagagagaagagtggttttcagaaaatgtcctcgaggagggagtatggggcagggcttaagaaagggggtgcagcaaggggggaaaccaagaggcggaagtaggcttctaaaaggccacacactatacctctctyctgcagtgggtgtcacggctgatgaaatgagtatgagggggctccacatggggcctataggagggggtcttttctcacctatgacctccactccttcaagaatgtagtggccgtgggggctggcttctgtgatggcctgggctttggcgacaacaccaaggcggcagtgatcyggctgggactcatggagatgatagccttcgccaagctcttctgcagtggccctgtgtcctctgccaccttcttggagagctgtggtgttgctgacctgatcactacctgctatggagggcggaaccggaaagtggctgaggcctttgcgcgtacaggaaaggtgggccccgggagaagggagaacagaggggcggctctgtaggcatccaggtagaggtgcttggcgggaggcatctctggagcacaaacattaagactgttgtgcacatccccatccctcttttcctcccaagaccccactcccatctgagctccagtctctccaccccctactgacaacccttctctcccatttccatccactcatcctgttttctgcacagtccattgagcagctggagaaagagttgctgaatgggcagaaactgcaggggcccgagacagcccgggagctatacagcatcctccagcacaagggcctggtagacaagtaagtattggccacagccccactgattaagggagccacagccagaagtgctcgccctgttcatcatcttcctaaacctgccacaaatctgtgaagtggacagaaaggggagtattaccttacatttcagacagagtccagagcttgcagagtctggcatgcccattgtccgccagctagttcatggtctttgaactccttccagtctagtgctcttcacactacattacctggatccctttgtgcccctccttccttgtcctctgctctggggttggagctctggggcagcaggaataagctcatcccacttctgtccatcacccctagtttgagtctcttccccaaggccaacccatctgttccctgaatcctgttctgggtgctgaggtgtaaggagaaggatgggcttcaaggtgctcgttttcagaaagacagcgggggtgattgggctgatcagagcagagctgtgctggtctgagaaagactcctagaagaagacagtatgaaacaggttcagaatatccactcatgactggtcagggtaaagcttggaaaagggagcagctgggcaaaaggacagtaagaaggaaatgagtatttattaagcactttcacatcatacctaattacatcttcacatacacaatcattcctttgttatattggccccattttacagttggtgacactgaggctcagagaggttaagtgggttgctcaaggctgggtgtggtgtctcacacctgtaatcccagcactttgggaggccaaggtgggtggatcacgaggtcaggagtttgagctcagcctgaccaacatggtgaaaccccatctctactaaaaatacaaaaattagtcaggcatggtggtgtgtgcctgtaatcccagctactcaggaggctgatgcaggagaatcgcttgaacctgggaggcggaggttgcagtgagccaagattgcaccactgcgctccagcctaggcgacagagcgagagtctgtctcaaaaaaaaaaaaaaaaaaaaaaaaagtgggttgcccagttggcacagaaaatccaagccagagaatcatgcaggccagttcaacatggtagggagcagggcaattagcaatctgaccttaaacctagggctagggagttcacattctcagaaggtagaaactcacrgccatccttcctgagctccaaggtgggagggcaagggacaggagggttaggcagtgagtgggggtgggggtagagtrgaccaggagtgggaggctaagctgagcctttccctctccaatctaggtttcccttgttcatggctgtgtacaaggtgtgctacgagggccagccagtgggtgaattcatycactgcctrcagaatcatccagaacatatgtgagtggggccagggcccaggccaggccgcttttttaccccagtggagaccagcagaagcctggggtacctagtcaccaggatctccaggactcccagggagcagagtcttctcatcttttcactggaggacaggaggctatggggcccagctacgcacctggagatcctgaactgtcaagccactggcagcctcatgccaccacatttgccagaaatgcagttgccctgtccctctccagatgtggggctttctccatatcctctgggaggggtggaatcaagccccagtgctgcctgcttggtggcgggggtgatgtatgtggagaagggttgggggagaggccggtagggcaggggctgctagtggctgtctcacatacaccagtaatcctgttaaagggctgaagaagtatcttagccacaggagcgatgaggcaaggattgtcagggaggggtctgggcttctgagctgatgcaggccccaaggacccctttgctgacctctgccaggacccacacagcttcgatggatctcagtgtttgttaacaaaatacaaagatctcaaacaaaccccttttagcttctcctagcaacatctgtgtcctcagaaacctctggttctcccccttccccctcccccaggctgccctggcacccaaattgctgccatgctggcatctgtagctcggtggcttgacattctccccagggacttcccggttcctagttctttgccagctcctccccactctgtgcgacctttccaagccttccctcaccctccccgccagcaccctctttggggagcaggaacttaatctgctgacagagctacacctttcataacaggctcagatcactcagctccctgtgacctttgtattcacccaggcttccttctcagtagctctagctgggggaggtgtcagctgggcccctcctgtgctatctccccagaggacatccctgactccacccctttcttcctcccaaactctgcacctcttcctcagctgctccagaccggccagggtaaccagctaaccatgcctggcatctggaagccagcaggccagagggtggcccaaaggctgatgaacggtagggaagggtgagcagattcctatgttggtgggcaccaatattccaagggcagctctctttgctgaatgagggccttctcgtgaggtactgacaacaccagcaactcgagagctgggaaactcaaggaggaggaagaaaatcaaaaccaccctactccctggggtgaggaaagaacaggaggggaggaggaggagtgtgctctgcacttgccttgctccaggatggggtggcagcagaggaatgtcacaggtcagcagcctaggcctccagctataaatagtccggagggcccgagaggctcccgcccgtccagcagggctgtcagcttcctgtgtggcagcacctggcacactggctctggccagcattatgctaaaaccctgttactctccaatgaaccagggaggcgggctcctctctgcgcctatcccttgagaattctgtcttaccagtgaagggtggggctgcccagatcaggcagcaggagtgaggggcacagtcaccccaggccttgctgagcccaggtctgggtactgagtgtccagagctgcctccccaggaggttaaggtgggggcaaaggggaagcttcaagcactttgcctacttttgttcactccccagtgcactgtgactcaggccttcccatcaggcctatttgtctacccaataaagcgtgttttttccagaaacaagaagagttgggagagggagcttcagtgcatgtggcagtgcgtgtgctggcgcgtatcattgcacgtatgttttccctcttaccgtaggaaaaatgaaaaaagaaatccctcctccataatcgcagctactccaggggtcagcggcggtgcccactcagtccccatccctctctctcccctcccgccagcgccccctcccgccctcgccgcaagctggccccggccttgccggcccttcttaggggctttatcatgcctcctgcaagaatagagatcacacacgggacggaaacgttagactctcatcccttgtgcccattccttggtcacgggccaagctgccgcatccttagcggtccaggcatcgcggtgcccctcgggcccctacctggactaggcccacagccgggctctagggggcgcgcgatccacctccagaaggccggctgcgaaaatctacccagctactggcgacgtcaccgcaccgtaggctgaggattggctgactctgatttagcatcctaaaacttccggttccagagcttggctcgccaaagaccctccctcgagggagagaaaccacagcccccagaattcagcgggcctctccgagagcacggcgcgtctgaggatgcgtagtaaggataacgggcccggaagccggaagttcaaagccggcctccagccagagtgacggcctgcgcggactcccgccttagtgggcggagttgtgccgcgtctgatgcgcagttccctttatagcgcggcaagccgaatcctagaggctaacccggcaggtgggagggagaaagttgctttctgcaccaatagctgaggcgttcagggttgtccagggacgctaccctcacgtgtctggttccgagtgctgcgttcggctgtgctgggaagttgcgtagacagtggcctcgagaccctgcctgcctgaggaggcctcggttggatgcgaaggagctgcagcatccaggtacgctgccggctagggccgagcaggggctgccagtcccactgcctgcgcgcccacctgggccagtctccgcttgccgcgtcctcccatcccctagtctgcaggcctggtgcccttgaattcacccgcttctgttgcgttgcggaccgcgagctgcactgcttcctgcccaagcccaagctcctcgcagcagtaggtcagtcttgctagagctcagcgctaatcctgtcaaacctcgactcctgcctggcgtctcgaccctccacgctccaactctgcctcttccttgctctatagacctctgcgtcctgataagtggctctccggggcacccttcgtgcatatcggctatccagctccacctcttgaccgctttcacttcctggaatgctctcactgctcctcttctccaggccatccttctaaaaagacagttccactcccaccccgattcccacccctacacctttctgctaagttttctcaagcccccaccctgtctttgagctgttgtctctgaactctcacagtgcctctccatgagaccataagctcctgtatgacagaagccatgttctttttagcggcctccgtagcatgatgtacgttatgttatgttatgttatgttatgttatgttattttgagacagggtcttgctttgtcgctcaggctgcaggtgtgcgccaccacgcccgggtaatttttaaaaaaaggttttttttttgttgttgttgttgttgtttttaaatagagaaaaggtctccctatgttgcccaacctggtctccaactcctgagctcaagccatcctcccgcctcggcctcccaaagtgttgggattaccggcgtgagccaccgtacccggccgatgtactactctctaagtgccaaacaaaaagtagataaaagatgatggataccttaaaagccctgagttgaccactatgcagtgtatgcatgtaacaaaatcgcacttctacccatacgtttacgcaattttttttttttttttttgagacggagtcttgctctgtcgcccaggctggggtcccgtggcgggatctcggctcactacaagctccgccttctgggttcatgccattctcctgcctcagcctccagagtagctgggactacaggtgcccgccaccacgcccggctaattttttgtgtttttagtagagatggggtttcactgtgttagccaggatggtctcgatatcctgacctcgtgatccacccgcctcggcctcccaaagtgctgggattacaggcgtgagccactgtacccggccgttattttatttatttatttatttgtttgttattttatttatttttttgagacggagtctcgccctgtcgcccaggctggagtacagtggcgcgatctcggctcactgcaacctccgcctcccgggttcaaatgattctcctgtctcagcctcctgagtagctgggattacaggcatgtgccaccatgcctggctaatttttgtatttttagtcaagacagggttttatcatattggccaagatggtctcgaactcctgacctcaggttatcagcccacttctgcctcccaaagtactgagattacaggtggctcacgcccagccttttttttttctttattatcattattattattatttttagagacacagtcttgctctgcaagtgcagggccgtgatcacagctcactgcagccccaaactcgttggctcaggcaagcctcccacccaaacctccctagtagctgggactgcaggtgcatgtcaccacacccagctatggttctcaatttttattctagcctaacacactggaaagatacagtacacctccatcagtggcagtgacttgattcagcagtggttttcaaccaggaagggggatgtagttaaatgaaaaaaaaaaaaaaaaaaacaggtgtttctggaatttttttttttttgaggggtggagtttcactcgttgcccaggctggagtgcagtggcgcgatctcagctcaccacaacctccgcctcctggattcaagcgattctcctgcctcagcctcctgagtagctgggattacaggcatgtgccaccccacgcctggctaatttttgtacttttagtagaggtggggtttttccgtgttggtcaggctggtctcgagctcccaacctcaggtgatccgccctcctcggcttcccaaagtgctgggactacaggagtgagccactgcgccgggccttggaatttcctacctgccttttctccttaattgttgccttctttgaactgttgctcccttggcctctctctttctggtcttatcctctcctttggttttgcttattacctccatatgtatctgaaacatagcttcccttctaagctgtatctatctaaatttgtatttccatctgcctgatagacatcatcacatgaatgttgtgttgagtatcttaattttttttttttttttttttttttttttgagatggagtctcactctgtcgccaggctggagtacagtggctgcaacttccgcctcctgggttcaagcaattctcctgcgtcagcctccagagtagttccgactacaggcaggcgccaccatgcccagctaatttttgtagttttagtagagatggggtttcaccatgttggccaggatggtctcaatctctggaccttgtgatctgcccaccttgacctcccaaagtgctgggattacaggcgtgagccaccgtgcccggccggtttttttttttttttttaaatagagatggggtctcgctgtgttgcctaggcgtagtcttgaactcctgggctcaagcgattctcctgcctcagcctcccaaagtgctgggattaccagtgtgagccaccatgcctggctgagcatcttaatttttttttttttttgagacggagtctggttttgttgcccaggctggagtgcagtggcgcgatctctgctcactgcgagctccgcctcccgggttcatgccattctcctgcctcagcctcctgagtagctgggactacaggcacccgccaccatgcccggctaatttttttgtatttttactagagacggggtttcaccgtgttagccaggatggtctcgatctcctgacctcgtgatccacccgccttggcctcccaaagtgctgggattacaggcttgagccaccgcgcccggccgagcatcttcattttaacgtgttcaagcccagctcatgatcctcctttttttttttttgagacagggtctccctgtcacccaggctgcagtgtaatggcatgatctcggcccactgcacctctacctcctgggctcaagcgatcctccaacctcagcctcttgagtagctgggactacaggtgcatgccactacgccccactaatttttgtattttttgtagagacagggtttcaccatgttgcccaggctggtctcaaactcgtgggctcaacgatccgtctgtctttgcctcccaaagtgctggcattacaggtgtgagccactgcaccggccacgtgatcttcttgatggacactgtcaccaccctgtatatacagtgatacatacctcttctcttgtttcttatttctgttaacagtatcccagtctacaaagtttcctaacttggaggtattaatattttcagctttgccctaattcgctccattgataaatccttttctacttccaaagtatcttctgcatctgttctttccacttctactgctaccactgctttagctcagaatctgaagagtttttttttttttttttgagacagagtcttgctctgtcccccatgctggagtgccgtggcgctctcttggctcactgcaacctctgcctcccaggttcaagtgattctcttgcctcagcctcctgagtagctggggctacaggcatccgccaccacgcctggctaatttttgtatttttagtagagacagggttttgccatgttggccaggctggtctcgaactcctgacctcaggtgatctgcccgactcagcctcccaaactgttgggattataggcgtgagccactgcgcccggcctgaagagtttttgctaattggatattagggaaaaccacaggatggattaagacaagagagggaaggtaaggttctagacagcaggattatgtctgttagttggttttatgtcacttttctagccaagctgtaccatcctgtttttgttggttggtgaatgcttccagctcttttcctccagcccttggaagaggtggtcctataattgttaagcatctagctagggtgatgagtaggaatagcaataagtgacagggaagttgaaggctgcagggctctttgcaggcggcttagcgttcagctccatgggtgtgtgttttgttcactattgcatgcacagcttggggccatttcaaacctcagatttcaaacctgaacacaatcctttctcatcttgaacttgtgtcacttagtattcttcctctgaccttacttaatatcactttccatagtgggattatatttcaaagaagctgtgtctcagctcagcttggggtccacactcaagacctgcctcaaaggcaatgttcagcccttagggtttactctgagaagtatttacatgtctgtacccatgtctgacccctctaaaccagcgaatcctgagctttactttcaatttttttttgttttttgagacagggtctcactctgtcacccaagctgtagtgcagtggtacgatctcagctcactgtagcctcaacctcctgggctcaagcaatcctcccacctcagcctcctgagtagctgggactacagccatatgccaccatgcgtggctaatttaaaaaaaaattttttttgtggggacagggtctcactatgttgcccaggctggtctcaaactcctggcctcaagtgatcctcctgactcggcctcccaaagcatgggattacaagtgtgagccaccatgccctgcctaggttcttgactttgttgtttgtgtgtatgctttggtgtgtgtgtgtgcgtggccatggtaaggggcgggattttaagtgtctctgcctacagtgctgagagccattaagtggagagcaagctgccaaaaactaaaaatagggccctcttaggcctcactggcaggcttattgggcccagttctctcaaggctcctcaggactgggtccaaaggtccttgagacattcccctcttggcttccaccctggcactctttttctgtctctttttttttttttttgagacggtgtctcactctgttgcccagg

SEQ ID NO: 94669 - DNA, 14744 bp, Homo sapiens
tggtctaaatgataagggttctcataaacgattaagtctttaagattagtagccgaaatcccaacggggaagggggtggcaggtataaatatttcccagacttaccttacttttatctataaaacaaagtgatagacaacagagccttggaaactgagaggaaataaaaacacactcaggagtgtttttttctattctcttattcaacacaacagtcatcaacacagaatacttctatgtccaaatgtgggctccccccgacaccccagtacacaaagcagtggacaccagctgagtgtcctctagttcaattcaattctgacctggagataaccccagatcccaaagctgagggctcagtctccaagaccgctcccctctccaccagacaccagtcgcaagtgcaggcctcagaaaattctaactgactggcctcaatttggggttcccataacccctctttgggttcaattaacttgctagagcagctcacagaactcagggatacacttacttaggtttaccagtttattataaaagatattacaaaggatatagatgaagagatgcacagggcgaggtacggggaaggggtgcggagcgtccatgccctctctggggcgtgttaccctccaggaacctccatgtgatcagctgtccagaagctctctgaaccctgtcctcttgggccttttatgaagacttcataacataggtatggttggttaaatcattggccattggtgatcagcttacccttcagctcctctgccctccctggagggtggtggtggggctgacagtcctaaccctctaatccagcctttccagtgcccagggcccatcctgaagctacctaggggctgccagctgttcagtcaactcatcagcatacaaagacacttagcgctttgcagattccaaggaatttgagagttgtatgccaggaaacagggataaagaccatatatatatttcacaacatcacagaagcttaatcataagccatcaatgttgcagttcttctatattcctataagaacagggaacagttcaagcttcctcactggatcaattctcttttgctttccctctgaccaatgactgtttcaaagatttggagaagtctgtgagccaagccagatcaaagccaatttggatccaatttgttcattaatgcatgctgtcaacaaaaagagtcaaactctgcaacatatttgaagagatttatcgtgagccaaatctgagtgaccatggcccatgacacagccttcaggaggtcctaagaacatgtgcccaagatggtaggggtgcagcttggttttatacattttagggaggcatgagacatcaatcaaaaaattttaagaaatacattggtttggtccagaaaggtgggacaattgcagggggtcgggggtggggtggggggttggggggggtagcagggagtgccattccaagccataggtaaatttaaacattttctggttgacagtcggttgagtttgtctaaagccctgggatcaacagaaaggaatgtctgggttaagacaaaggattgtggagacccaagttcttactttcagaggaagccttcaggtagtaggcttcgataggtggtagtaaaacgtttcttatcggacttaaagtctatgttaatgttaatgtcagagaggtataacaagtcatgtccgacctccacttcccactcatggcctgaaactgtctctcaggttaaattttaaaagacccctggatgaggaggaagtccattcagatggctggggagagggggaagcttagaattttatttttggtttacaatacattaatatttgtttaagtacttagggattctgcagttagcaaaatagataggatcccagctctaggaagcatacattctaaaggatagaacctacaacacctgcttctttaaaagcatactaactagaggacaatttattattgtaatgtcatgagcacttgcttgttaaaaaattccttttttgagacggagtctagctctrtcacccaggctggagcgcagtggcgcaatytcagctcactgaaacctctagctcccgggttcaagcgatttctcctgcctcagcctcctgagtagctgggattacaggcacctgccaccacgcccagctaattttcgtatttttagtagagacagggtttcactgtgttggccaggctggtcttgaactcctgacctcgtgatcgcccgcctcagcctcccaaagtgctagaattataagcgtgagtcactgcacctggccaaaaaattcctcttaataacttcttagaaggctaatacacaaaatagccaccttttctgaatccaaccaaacaaaataacttattaaccacagattttcctactgctttgtattttctgaggaaaagaaacaggtgccaggaaagctaaaagggatgtcttttgtaagactctcaggccctcctacagggtcaatttaggtaggcctgccccagtcttctaattctacatgcaagatacatatgtattactttttcaaacaacactgcttcctaaatagaggagaacctatgaaatgagacctgtgattcttttttaaaaacctagatgcatttggatagaggaaggtgggcctgtgaactctagccctgtaagcaggaaggaaagttaaatagttcctcataatacaatttaaagatatcgggtggcaattgtaaaggaaagaaagaagaggggaagaaggccaaagagccaaccagattacaagagcctggagtcctcctttctttgatggtggccaaaatatattttaaggatagaaatgcctaatattcaatgtcaacacttctgatatcgctccactgtgaaccccttcaccctccccttcctctaaatctctcataaagcttaccatactcataaagcctttctgtgaactctttttcttttctattctttcctagctcctgtgagacacaactatccaacaactgcatcatggatctctcaaccatccatttagcacctccttagattagtccaaaactgaacttatcttcccttctacacctctaccatcaattgtttttaactgctccttctcatatcctccaacattccactagctcattaatgtcatcatctaaaggaacaactaatatttactgagcacttggaatgtgctaggtaccctgccaaaggcattacatgcataattcctcaaaccctactcaacaggtacgacaatcatttcccaaatgttaggaaatcaaagttctgtcaggatagttattctaagggtaagtaatagaattagaatttgacccgttttaatttcacagccagcttacccagtacatgtcaatcaatgcctgaagtcaaacaacccaggattcatccttccctccttaagcctacccagtcacttacctagtccagcctcctagtcatacctcttaaacaccacgtcatttctccttccactgccagcacactagcatttactaagtccttactatctggcaatcactattctaagtaatagacatgttttttcaagttctatcccccaaactctgagatgacaaacctaaggaacaaagaggtttcagtgtatgacagagcctgattccaccccaggtaatctgaatagagaatccctgagcacttaacccctccattagaacagcctccaacttagtctccatatcgcccatctggaagcccaccatcctccagacgctgcagatatctttctggaatgcttacccgttatcatgacattctcctgcttaaaattagcagctcagtatcactgactggataaagtccaaatttcttaatctggtataaaaaatccttcatttttctgttcaagtcaattcagtaaatattttagtgcccaatgtaagcaagaaaaggtgccaagtgttctgaaatgaataatacatgtccctgactactacctccacctcggacactgggtccttcggccagacaagcccatatgcaaagctcgtaatacaacagcccaaagacacatacatttatttttaagtggcctgcgtgctacgtgcctacaatgtacgaaatcccaaaccaatctgaagactaagtgcctacgtaacacctattcttacaggtctccaggcagaaatgctccctaagttcaaattacttcagggtaactagtgggataaaggcatggatcagtttccaaatgagaaaactgggcaagaagcaacccccgccatcaatggctggcatgcagtaggtactttatcagtggctaaatgaataaataatgaaaaaatttcaaagttgatgagagaaacaagatatatggagaatgtaacacacaagtgggccgaattaaaagtgatgttattctactttggttctcatttggcctacttttaccccatgggaaaactcacatgtgggactcggacaagctaaaaagccaaaactttgttattcatggctcaacaaagctttgacaagccaaaaaggataccasattcccgcttccttctttacctgccaaagtccattttctaaagaggtgtgggggtgggaatcaaatctagcaaagtaaataaaattgatctactgagatccaacttcattagtgctgcatcgaagtacatgcaaaagaaatatcaaaacctgtcctgggaagaaggccaatttacaagtaagtactattgccgcaagaatgtgaaattcttaaaggcagttccaataagctggagctcacaagtgttcctcctcctgcaccgccaccgcttttcactcaactttgtttctgatttctgtgattttaaaaagcataatatacacagcaaagcccatgcataagtgtactttagctcctggtacaaacgaacgtctggattcataaacttaacgtaaactgaaatactagaagaaacactacatgagtcaaaagtccttgtttaaaacgtggcatamagctttgaaaagcgagtgatgtatttcctgaatgatgctttgtgtgcaactgcttccaaatcaagattcatatttttaaattaccccctggaagatgtcaaatctctctcccaccctctccagcctaaagagaaaggtgagaattcacaggcaacaggctggggcggagggaatgatctctccccatccctttccagagaacaaaacccgataaaggcagctagtgccactctcattgccgacaccacacacacacagaggaaatttaaacactcaccccacctctcccttcccttaagaagcaaacgacgccaagctctgcaccacggtggccggaaccagcaaacgctaacagccggaggccgcccgcctcccgggcgcctgcaggcggcgggcaccgggcgccgactctccctcctggaccagacccacacccgagtccacgccagccccgcagcccgggcgagcgaagacagccgcgaaggaccaaggctccggggcgagctgtggcgccgctccggccgcctcccggggcgcggcgctgacccacacccagctgacgcccgcacctgaggcggctgcccgcagccagcgagagggcgcgcagcgaggcgggcagggcaaagttactcactgggaaagcgcggctgcccgggccgcgcacgggctcctggcgccgctgctcggcaccagctcccgctctccgcggcccgctgagggagcggagagcctgcccggctccgctccgccaggaatcgccgccgccgccgccgccgccgcggatttcctggcaaaaagcaaactccggccaagacttcacttctcaaccgcccctgctgccttcccgggggcagcgccaaggccgagcggcccaacccgcacccgggccaatcggaggtagcacagggcgggaggtgggcggaccagagggcggctccacctatccgagagctcgggaggcgggccagaagggacccgtcactcccgggttagagtgagaccactccgccctcgccgcccgcctcccccactcgccccgggctgtccccgccgcccgcctgattcccctgcggaagccccgctggctaggtgtctgcgcgcacccccggccgccgccaagagtggcacagctggggaaggagtgaacatccagaggaatcgcggggcggggkggggggaggccaggagaacaggtggcgcagggaagcagaaacgtagttgcgctggacagctggagtcgggcagggtcgrggccagcggcgaggggacaagaagggccgattcgagaggaagcgcacctgagggagcacagcgaaggccgggacgcagggagctggatggagagcgagcctgggcggcgaaaggttgccgaggcggggrctgggcgcctgggaacaaaggtgagggcgggttccgcaggtgaggaggtttgaggagccwctggggagaaagggaamaggaagtctacagccggagaggacgcgctctgggggtagaaggaatcctaggacggaaaggwtaaggtgggaaacagttttctcccaaactctcactcccccaaaagagacatttctttcttgccctattttgacccagttgaaaatgcaactgcaagctycccggtgaaacaaataycgccttcaaccttygtattctgtggtgactcatctcgcacgtgacccccctccctcttcaaggtgtgttgaccgactacagtttaagcctgtcgtcccacaaaaggcccgggagggccggggtcccaggaagggccatcctgggtcaacaccgccccagttgggaagtcgggccgctttcggacttgccactgggaagggaagtgattkgggggcggcaggtaaggccgcgccccttcgccatcacctggggaaaggtaccagagttgagccggggcgcccgcaggcctgtctgggcctcggggtaaggcggygctggcyccgccccctgcccctcccgccgcgagtggcctcgcgtggtcgcccaggtgagccgcrgggccgcgagccaccgctcaccccgcgtcggggcgggggctgggggtggagcctcatgccccgccccgcggctgggccctgcygcgccgctgcggctcctcctccctccttccgtcctccgmgcyttccgtcggtcggtccttscttcctgcttcgcctccgcgcctcgcgctatgggacagagcccccgatccgccagcaccacctgagratccagaaaccgccccagcgatggaagaggatcaggagctggagaggtaacggccgaggaggargcgggcggagcgggccgcgcccaaggggagcgggtggcckaggggcacgctgcctggcctggcagccggggcctgactcggggcgcagagaagaagcatggagagagaagtggggaggagacatgaatgtgtttcagttgagaggctgagaggtacrctagctatcaaggagggaagacaagttgggagaccagagttaagtatccgaactgcccacccccgttacaacagcartgtgtaaaaatcacgccccgggcctctgctcctgaggacggtactcgtgcctctgtccctgtaactacggctcaycttctttctatgtgcagactgctcctaaagccactctgtgcgctgagctctttttctccctgctgcttgactcctgaaccttccattctcctagtttccttctcttgcaaaatggaagccgtagttgggcctgcacattgatcatctgtatcctctatttttatactagagcaatcgggatttctatgcctttcaaccctctcttcatcctctagcaggaccagtcctattctaatcctatcccttgcttgtgactctaccaaaaaatatttttgcaaacacttaagtttgtgtttttctaagaaaactccccttgtggccagtgtggatggtcaaatggagcagggaaaaactggaggcaataaattaaatatttattgatagagtttgtggaggcaggaaaatgagaggcgaataattctgtgtagctggagtagattaataataatgtgttgcaatgtgatatagtaaatgagaaaaagctagttacaaaacaatattcagtatgatctcatttttataaaaaatatgtgtgtagaaaaatatctggattgaagacctcaatggctgaaggcgagaggaagacagccctggaaatggtccaggcagctggaacagatagacactgtgtgacatttgtattgcacgaggaagaccataccctaggaaattctctacgttacatgatcatgaagaacccggaagtggaattttgtggttacactacgacccatccttcagagagcaaaattaatttacgcattcagactcgaggtacccttccagctgttgagccatttcagagaggcctgaatgagctcatgaatgtctgccaacatgtgcttgacaagtttgaggccagcataaaggactataaggatcaaaaagcaagcagaaatgaatccacattctagtcctttatgcagtatacaaggagaactgtmctgtaggatattctcttcytgatggtgcagaacccagaattagaagtttgtggttacagcatactctgtccttcagaaaggcgtgattctagctgttgaccccttgcagctgttggaatctctgcaagaacctctgtattcttctaataaattccctcttttatttaaactagtttgactggtttctgttccatgcaaccaaatggtccttgaggatgactttttttctaattaagccagcattgaaaatgaggaaactgagaatatcagaggcctagacaagaactgtgatcatgggaattaaaagaagtatatatccatgtctgtagttggagtggtgggggtaagggaagagacaaaaaccatgaccccagttagattgttgttagtttaaaaacagaaggaaagaagattggggtggggacttggcttcttgctaaactttttggcttttaaagaattgcatcatttgctgtgattggtagacttggcaagggtgggaataatttggaagaagtgtgagaattctggttttacatgagagttttagggagtaaggctccatctttgaggcatttacaggaaagataccagtttactgcttgaattttgggatatacttagtcatgatctaagtaaggtaagatgttttgattatattacagaaggagaaaattgggatgactagaaaacattttcagtccttaagtaggtatagcctagggtaatgtagaagaagccctatttgagagaaggtaaagccaaggagaaggaaaattccatataggggaaatgactgttttggaaaacacatatcccacccgccagtgctctgtgctttgggcccttgtttatctatcccctcttcctgggccagtcttactcctgccgtactcttaagtcaaagcttatgtgtcaggcctctcagcctagtttgggtacttctttgtgctttcattacaccctgtgtttcctggccttggcatttactatgctattggtagtgcttatcttgtttacccactaaaccaacttggaggtcaacatgattctggtacctggaacacctgacaggtagtggacacttagtaaatactctatgaattcatgtaagtagttatggcatgcagcttttcagtcactcaaacctgacctcttacactagcgtgccatagagcctacatttcctacactcagccaaattctttaaagagatatccatatttttgagcactagtatgttccaggccttggggatagatatatagctatagtggatgagacagagtaagtcctgttctcataaagcatgtgttataagagccccttaaaaaaaaattgtgaggctcggcatggtggctcacacctgggaagccaaggtgggaggatcacttgagcccaggagtttgagacaagcctgggcaacatggggagtccctgtctctacaaaaaaataaaaaaggtagccaggcatggtgacacatgcctgtagtcccagctgcttgggaagctgaggcgagaggatatcttgaacctaggaggttgaggctgcaatgagccatgatcacaccattgcactccagcctgggtgacagagggagaccttgtctcaaaaaaatatataaaattaaaaacttgtaattctgtaaaagcagcaaatgtagggtcaagatagaaaacataagaaaggaatctactttaggcacggaagttaggaaaggtgttctagagattacaggaagggagagagctggctgtgcaaagaggagagaaaatgcattctgggggtatagcatgtgcaaaggtcctaaagcagaaaactggtggcatgaggaactgaagatattgaacaaagatttgcatgtttttgtagcacagtagacaaggagaagggcctgtcctctggagtccatgggaggaagagttggggtagtagggattttggattttaggttcagtgggaatgacgtcttctttactttgattacagagtggggggagatgaattatagggaggctggagtagaagcagagagagacactataaagagttgaagtggcctggaagggtagaagctagtgatggagaagagaaggtaggtttgaggtatattttagaattgaattggcacagaattggtacacttcaggaactgtggaagatgaagaatcaaagatgactactgcctagctttggggccaattactgaaattgggaagcttaaaatggaaaatagattgggaggtggaaaagatgataggagtcaaaagtttcatttgtgaacattgtaagcagtggctatgtgagttggagatcgtggaagagatctaagctggagacaaattttatgagtccttgccataaagatgacataaattgattaaaaaaaaaaaaatagagggtgacaaagaagtgggcccagaacaaagccctaggcaacttcagtatttaaagtttgggtcaaagaagagttaaagataagagtatttgtaagtttgggtcaatgtaatggtaggaaagtgcaaaaatagggtgtggaagccaagggtttcaaatagggaatagaaaaatgtcacctggagttaacgtggaggtcactaggcagtaacagcattagtttactgcctaagaagagtaaacattaccactcattatacagaggaatggcttagtttggttttccaataaaagaatcacatgaagacattggaagaggtgagtttaggcgggagcagggatgtcatagggcaaggatacagcatattctcttatggtgacagtaagaaattctggaaagtcaatgtttgtttaagggcattagcctttgaagataaaaggaagctcaaaaaggatgtggaaaaggattaaaaacttttttcctctcccaaaactttgcctgtggggatagtaaacagaattacttacctggagtttaattcctctaaaccaaggcctgtcaggagatgaaaacaaagtttaattagtggacatcaaggtacagactgatgatagtagatgaagtacagtgggaaacacagccagaggcgaccgctcaccacatcacaacttcattgcacctaaaagaatttagactgatcacgtagaatgcagtcttgaatgtctttagggtgaccataaactcacgggttcatacaaaacacctgcagaaggcagttgggtggagggaagaaactgagaagggggcaggcaggttaaccaagagtcttgtatatgtgaaaggaatctgcataaagtctgtagggacctgagggaaagctgagttggtccaaaaaggactagggagatgaatgtgaatcttatacatcctgtgaaaagttaatccgcatctgatttgcactccaatagcatttcattctaaataaactcatgccagtgattcaagatcagaaattctcttcagctgtaaagtactgtgacttttaaaaagctgattattaaatatataccaaaggcttttaacatgtagtaattctgagtacttgctggtactttctattttcaaagcactttacaagctaattatttacaaattgcatatagctgtaacatctaagtactctaattagttggcataatgcacaggttcacacagaatctcgagagatggaaaggtgtctacaaagtggtctcttcagtactgacccaaagagtgtcttgcatctcaagagataggaaagcatatcaagttccgtggcctaccactccccactcttcttttagtttcccttaaacacgttattcagattttagatggtctccagatcactagacaaaagtcttctttttggttagcgtaatttagagtcattctttgtaacaacctttaaactggtctcttaggaagtttacccaaatctacccatctgctttcaagtacttattaagacccccaaacccagccttttcttgctcaaattcttaatgttgctattttcttttcctgctttataaactatcctggtacagttactgcgtgggtctggtttttttttttttctcatgatgaaattcttctcaaacttggattattagatctctaattatttaactatacagtaagtatgtacctaatagtagcacagtcctgagaaatggtggaaataagagactatgagtctgtcctgaaaacccttctgtggttttggagaaggcagacaagagctgtacacatgaaaaagaaaaccaattgtattgacaatgaagtgcccgaatgtgcagtgtggagtattatgtgatgaattcagaatgagatgggtgaaaggcactgctgaaacatcgattctttcatgagcactcattctgttggccagtgaagatggcaaataagaattggcggcttatgattaataacaggaataaatggtttccttttttccagtgtaagagagctgttaaagattcttgagctagaactgccgtaaagttttagtttttttttttttttttttctttgtcccatgcctgtgtgcagaatgggtgagtggaaggaaactggaagacagcagtgaactggggacatttgtaatagtccaggtataatgtaaggagggcatacttgtaagagaggagataaaaggatggatacaaaaaaaaatgcttaaacaaaaaaagtaacttggagacagattctatagaggggtaatagaagagttgtagatgaccccaaaggccccatatccaggttcatttacccctttgtttatcctaccattccctcacaaccaaaaaccagtaaggcaggatttatcatttcttttctccagcctgtccttactaacgggagttagtgggtgcaaccacccttacctccttccccaacccatatcagaagaattcatgtattttacaaggatatgaatccagggctacagatgtgaaaattgagagttaagaagaggcgatcagggcagtgaacagcctggctcttacggtctgcactcaccaagctgcttgctttacagggaatgttttcattaattggctctgtaaatattgagcacatactatacggaggcacagtttaggggccaggatacggcagtgaacaagttggcccacatgcagtttattttctgatggcagagttagacaataaagaaacatgcaaacatttaatttcaggtagtaaactaatgatgacaaggagaaaacactgaatagttaaggaaggcctttctgaggaggtaacatttgagcagagaaatacaagaagagagagaccaaggataaaagagaatgagcccagaatttttttaaaaacctgagcttagattattcagcaatgaaagaaaaattatgaacctttctagaggaataaattgtatatttcagccttgtgtttgtgacttttattagtgcctaaatttatatcatctgtttttaatctgtatatgtatttacctaacaattatagtaaagaatattggactactctgtgggaaggaggatatgtaggatattggagttgttttcgattggctgatacatgtatgtatattggaggggcttattttaattgaacttttttattcttcttttgagacagtcgcactgttaccaaggctggaatgcagtggtgcaatctcaactcgctgcagccttgacctcccaggctcaagcagtcctcctacctcagcctcctgagcagctgagactacaggcatgtgccaccatgcctggctaattgtttgtttttgtttttttgtgtgtggagacagtctcactatgttgcccaggctggtcttgaactcctggactcaagtgatcctcccatctcagcctcccaaagtgctaggattataggcgtgagccactgtgcccagccaaaatagaccttccttaggaatagaaattgatatgtgtggaatcttgggtatcttttcagtaagcataggcatagcaaacttaggcagtataacattggaatttagagctgttggactcacaatgcctgggttttgatcctggctctagacgttagccatgtgaccttggacatactgtttgatctctttgtgcctgagtttcttcttctgcaaattgggataacaataataccatatagggatgttacaagtgttaatttagataatattcaaagtgcttaggacagtacctgaaccataaagcatactctcaatcaatgttagctattaatgttattattgtaatatcattgatgttgagcaagctggg

SEQ ID NO: 94670 - DNA, 13855 bp, Homo sapiens
acagtcttgtttgttccaatgaaagctgctgattgcaccgtgactattcatccctccaactggtaataaattcattacacttgtatttagtcttttcttctcaagactaattaatggtaagcttaagacacttttaatatgctaagatgtacacatttatgcctattattatatacattgaaaaattaatctcatttagcaaaacagatccatttcctcagccagaataagaaaaaagatggctctgtaatgaagctattaaagscttttctatcagcattcaamatttaaaataagttgctttacagattgaagaaatcaaaagatggcttcaggccctcagtcatgagaagcaatccagacttaaagaggaagaaagaatgtgacatgtaggaggtaatyagaaaacttaaagtgagttctatttctacaggaaaaatgatggctttgaaacatatccttccaatttaacagctgtctctcctttggctcaagaggatgggtgcgcgcgcatgcgcacacacacacacgcgcgcgcgcacacacacacacacacacacacacacacacacacaccacagaccacagaccaggaaaggccttataagggcatataattcaactcactcctttcttaggtgaggagatcggagtttcaaaaggaaatgccttgcttaagggtacagctaatgcttgctggagccaagatattgccccaagattttcactctgatgcagcgaactgcactcggggactgcactcctgactcctaaggagtggaccctcagctggtttctggcctcccggcagaatcttaaactgcagaaaagatactgttcctccctctggcaggccaagagcacatccaatccaagggaccataattgagactccaggattccagggaaaccagagagaatcaccccagaatcatcctagtgctcctgcctttcttttctcctattgagataaatgggcgtggaggggctcttaacgcattagactcgaatgcacatggagctgtttgcaagtgattcaggagccaaatgggaaagcaggttgtgctgagaggtaacccggccccaggaaaagcaggtggaggggagggggtttgctcgcactccaaaacaaggcaagtacagggccacccacaacacaacgtgcagtcttcacccaagccactgctggctgacttagctgtggttgtgctttgtgtctcctagcagccaaatgccttctaaagaaataaacatcaaactttaaagagttcaagttggttttattcagaagtctgactgaggactatagcccaagaggagtctttcagagaggttctgtcagacacctccaaagctatgttttagttcacagtttatatgcgggtgatgaaggtttagcacgtgtacaatcacatcaaagcttgggtgcaagagtacatctggttataattacagaagcataatcattaaccctgtcagatgttatcttacgtgcagaaaaaggcaagggctaggatcattcatctttcgagaaatatagtgactcaggcaagaggctttgtgaaattttgctggcaaacagaaatgagcacacgtggcttcttacatttgctactttatctcacatggtgatgtgaggcaaatgcagcaactcctgaggtacaccaaccagggacacatcacctcctgggattgctgatgccgtctttttataattttaatttttgtgggtacacagtagatgtttggcgccctttttttttttttgagatgaagtctcgctctgtcacctgggctggagtgcagcggcacgatcttgactcactgcaacctcagcctcctgggttcaagagattctcctgcctcaggcttcctagtagctggtattacaggcatacaccatcacgcctagctaatttttgtatttttagtagaggcggggtttcaccatgttggccaagctggtctcaaactcctgacctcaagtgatccacctgccttggcctcccaaattgctgggattataggcatgagccaccacacccagcctcatgccccactaaatagcagcacaaacacaacttttatctgtttctttcctggcagaagtttggatagctgtaccctaggacatggatacagaaaccctgagtgtccagtggcggaactactatgtgaggaacacatttatttaatcaacataccttttgctaagcaaggtcttcactttcagccctcggctgggagaaacctcgctgctacatggagcaattcattagcaaggcagcctggattcccatagtaaatgtctttatttccttcaagcacaatttaatctgactcctccaatggtaggaatatgaccacattaattggcaaagatccctaccctgatcctgcaaatgactgcctcagaggctctctagatccatctgccttcaatgttttactgttgagtccctttatcattaggctatgggtcatgccaataacttcaaatgcaatatcaataacaataataaatcttgaggtggggcatggtagctcacacctataatcccagcactttgggaggctgaggcaggagaatcgcttgaggccaggaaccttggcaacatagcaagacctgatctctacaaataaaaaaatgaaaaaattagccaggtatagtgacacatacctctagctctaactactcaaaaggctgaggtgagaggattgcttgcccaggatttcgagcctgtaatgagctataatcacaccactgcattccagcctgaacaacagagtgagaccctgtatctaaaaagaaggaaataaacaatcttgaaatcttgaaccatgtactactatacagatgttcaaagagctcatgaaacaggacaatatttttcattttccaataatgggtttggcactttcttcagataaaacaaattgaggagcgggggttgttttactggaacttagaaaaagttatcactaaatagggaaataggcagaaggctttgcctccaagaagcagggaggaaacccagagatgcccttagaacagaaagccatgcagactcaaggtcgttgtatccctttggtgacttcttagactgaatttccacatgtgagtcacagactgagacgaaagaattagtctctggagtctcacttcatgccaacctcggattcccagctctggaaccagctcctaggcaaggtcctaacataagcctttgctaaactctgctgcaggcatggcccagtgtgcagagaaaagggtcttctactcactcatgcagcttctgccccagatgctgtggagaaacaaagaggatggagatgcaagcctgaatctcaaggtggttcccgagataatgtgtgactaattccacgtgaaagttgagacactggagagacactgcaaagatagagtgaatttagacacaaataccttctggctgtggggatcagagaaggtttggggccatggggaatggtgacaggagggtaccccgggaaaagggaacagaagcaacaaagacctagaggagggaaaattagacggactgtaagtggaacagcacgtagcttggttcgacaggcacatcagattcagagtgtttaggggagagccgactgggcagctgatgagctgaatgaagaaagaggctgatgagctgaatgaagaaagaggggtggggacaggcaggatggaagggcctggggtcccagccagccagaattgtggtcaaataataattctttatttaaccatgtgaacttgaacagattctttacctcctatccagaccttacttcctcatgtgtaaaataggaatcgtaatagcactgacatcataggattgcatgtggattaaattatcttagaaaatgcctagcatatcataagcagacaatagttatttttgtatttgaatagttattttgttatgtttgaaatgattacttccaggaacagaatttctcctagatgaattcagaacattgtgtcacatgtagtggatatgttttgggattatcaaaccagggtatttttatctcctgtggtctcaagtccctagtcatcttggacttcctatcatacctggtcaactcaaatcacagagtttcttccatcatgtaagagaagatgctcttccaccattaacactgaaccaggaagcttaatggccctccaaaggaggctatgatgtagaggaagtcctttcgatagaggaagaagaaaacagagcccatcccttctagcctcagtggatggtggaaaagaaagaaacagaaaatacttgaaggctgaatgcatttgtccttgctttctccttcaggagctaaatctaggtggtggaggtggggaagctatagaaacatctaagtgtagagaagcctgagatcatggggcaggaaggcagcaatgggatgcttccctgggctcactgaggaaggccccagacctctaagaggagccctgcaggtgttctagagaaatggtgatgcagccacgggaggaggcagggagatggaggagtctgaccaatgccctaatatgccacagcaaacggtgaggtgcagggatccataaattcctgtatgccctacttaggggtggcagatgggcagaggcccagagtaaggtcaaagtgatcattatgtgtggtgcctttgctatcaaggacaagtggccaggaccacagactccaaaagaccagatggggcacattattcctcagcaatccatcctgaaatccatcctgcagcagagccagcaaggatccagaattctagaacagtatatgattctgatcttcctcctcccctcctccaacatgcagtccctggaagctcaaccatattagaaagtagcaagggcagggactgaaacccaaaagatttcacatgtccagaaatgaatgatttcaactgaagggagtctatgtacattcaaaaagactgtatatcatgaatagcttccccacctcccatgagatgggggctcctgaagattcaatcaatggtagaaaaatcaagaaggtacagtttccctgtacatccaagtatagcgtcagccaacattacacataattatgatgagaggcagccggagactggggactggattagggagaaaagaggaagaaaagctgtcactctggagatgtatgatagaaactggaattgtcacacaggaattcagtccttctagattcagtccttctagaatggtgcttgaaacaaaaagaagttggtatgtcctcactgtggayagtacagagacgtgtcattgatataacatatggtagccctttatatcagcagctttgctatttgtgactttgtgagcaatctcaaagatccatgatgtggtcggtcattcgttattttgcgaagtgtaagtttccatcttgcaccccagcagctaagcctacccaacaacaaagcagccccatttcaatgaggctttcttgttctttactcactattgtatttcatgctctcatgaaataataaaaaactatattcctttgtgggggaatatgcccctcaaagaaagccaagggttttctcggaatggaagctggtgctggttttgaaagtaaagaaagaaatgaaaatgttattaggtgaagagttaaggactctctaagaaaaggatagattttagcccatctaaagtttggataactttaaagaatataatgaatattaagaatctctagttccagtccatggcatgagtgaatttaatataatacaatttataaattataaaaatgtaatttaacataaataagaagtgattcatacattcatgctccagcctatagaggaaaaaaatacatcttccggaagaaattgtgtgccatggtggtggttatataactaggggtttccaggggaattctaagttccaggatgagtctttcatgaatgtcaaggctctatcttttctagagttctgttaaactttggatatcttccctcaagagagccccgtgggcagagctggtgtgagacgagacaatcctgccccgccgccaggataatcaagagttttggccggacctttgagcatacactgagagagtgaggagccagacgacaagcacacactatggcgctgaaacggattaataaggaacttagtgatttggcccgtgaccctccagcacaatgttctgcaggtccagttggggatgatatgtttcaytggcaagccacaattatgggacctcatgacagaccatatcaaggygstgtattcttttggacaattyrttttcctacagactaccccttcaaaccatctaaggttgcatttacaacaagaatttatcayccaaatattaacagtaatggcagcatttttcttgacattctaagatcacagtggtcgcctgctttaacactttctaaagttcttttatccatttgttcactgctatgtgatccaaacccagatgatcccctagtgccagagattgcayggatctataaaacagacagagataagtacaacagaatatctcgggaatggactcagaagtatgccatgtgatgttaccttaaagtcagaataacctgcattatagctggaataaactttaaattactgtttcttttttgattttcttatccggctgctcccctatcagacctcaccttttttaattttatttttttttacctccctccattcattcacatgcttatctgagaagacttaagttcttccagctttggacaataactgcttttagaaactgtaaagtagttacaagagaacagttgctgcccaagactcagaatttaaaaaaaaaaaaatggagcatgtgtattatgtagccaatgtcttcactctaacttggttatgagactaaaaccattcctcattgctctaacatgctgaagaaatcatctgagggggagggagaaggatgctcagttgtcacatcaaaggatacagcattattccagcagcatccattcttgtttaagccttccactgttacagatttgaggttacatgatatactttatgctcataactgatgtggctagagaactggtattgaatttatagcatcagcagaacagaaaatgtgatgtattttatgcatgtcaataaaggaatgacctgttcttgttctacagagaatggaaattggaagtcaaacaccctttgtattccaaaatagggtctcaaacattttgtaattttcatttaaattgttaggaggctcggagctattagttaatctatcttccaatacactgtttgatatagcactgaataaatgatgcaagttgtcaatggatgagtgatcaactaayagctctgctagtaattgatttatttttcttcaataaagttaaataaaccaatgagttagctgcctggattartcagtatgggaaaygatcttttataaatgcaaagctgttttttgtatatactgttgggatttgcttcattgtttgacatcaaatgatgatgtaaagttcaaaagagtgaatattttgccatgttcagttaaagcgcacagtctgttacaggttgacacattgcttgacctgatttatgcagaattaataagctatttagatagcgtagctttaaagtgctgcacatgatactggcagccctagagttcatagayggacttttgggacccagcagttttgaaacgtgtttatggagtttaagaaatttattttccaggtgcagcccctgtctaactgaaatttctcttcaycttgtacatttgacagctgaaaaaaaataacatgggagtaataatcggtcaaaatttgcaaaataaagtactgttttggtgtggggaaaaagaaaaaaaagagagccccgtgggaagatagaaacatacagaccaggtcatattttgattagatagattatagctggttgtaagaatattgattgaagaaactgtgttgatcttaagattttatccattacttgactaaacataaagaagggaagcttatcaaaggtctgggtccccaaaggggacacaagtctacagcaaacacttcgatgatttcctcatcatttaagctgttagcgctacatcagctagcaggaaagttcacaggaggcttcaagcatggtctggcaaactcccccaaatgataagctgaggtcctgcagtttgattttatttcagcaaatggtctttgtgttatgaagagcgaactgtagttgaactctgggaattagtcttcctccttcctttcattattatcctccccgatggtgaggatcaactccaccatcggcagagttgtgggaatgtcaagggaaagaagcaggtggggaagtcggtgttgaccctggaaggcatcgccatccacagtcacattgtctttacaacaacatctttaagaattaactaatttattttttaattggctaataaaaattgcatatatttatggtgtacggcatgatgttttgaaatgtgtatgcattgtggaatggccaaagcaagctaatgaacatatgaatcccatcacatgcttgtcattttttgtggtgagaaaacataaaatctacccttagcaatttccaaaaatacagtaaattgttatcagctctagacaccatgttgtaccatcgatctcttgaacttactctgcctgtctaattgaaattttgtgcactttgaccatcatctccccaaccatcacctttctcctcccactaccagcaccacctagctgctagtaaccatcattctattctccatttctaagagtttaaccttttttttttttttttttttttgagatggggtcttcctctgtcacccaggctgaagtccgatggcacaatcacagctcactgcagcctcaacctcccaggctcaaacgatcctcccacctcggcctcccaagtagctgggaccacaggcccatgcccagcccatttttgtatttttggttgagatggggcttcactatatttctcaggctggtctcgaactcctaggcccaagcaaccctctcacctcggcctcccaaagtgctgggattataggcgtgagcccagctgagtgtttagattgcacatattcacaacagcatttttgttcatggttaggccactgctttccaggtctctgagcatttaatgaagaggcagtcccagtttcagctccaaggttattcttattatagcaccataaacacatatcatgcttatgtttctggttcgcagattactctacctgagcctgactcctttgctccaagcagggtttagctaagaacctctcttaatatcaggtacacaattctactgaagtggctctgactgagtgaagcttctataccccagtgtgaaggctaaatagtgacaccctccacaaatatgtccacatcctaatccccagaacctgtcaatatgttacctatggcaaaagggactttacatgtgtgattaaggtaagcatctgaagatggggagataattctgcattatctgggtgcacccattgtactcacaagggtcctaataagaagaaggcaagaataatagagttattaaaaaagagagagagcgattgagtgataggctgggtgcagtggcccacacttgtaatcccaaccctttgggaggccaaagtgggagaattacttgaggctgggagtttgaagccagcctgctcaacatagtgagacctcatctctatttttaaaatraataaataaataaatagaaatgtttaaaatatgatgagatgtgatggaaatgtgatggcagaagcggaagttggaatgttatgctttgaaagagccacaagccagggaatgcacacaacttctaaaagctgaaaatcaaggtaatctccagaaagaattcagccctgcggacaccttgattttattttatttttgagacatttctatttttattttaccaataactttttttaaccttgaacttaatttttttccataggttactcgggtacaagtggtgttcggttacatgagtaagttctttagtggtgatttgtgagattttggtgcacccatcacctgagcagtgtacactgcaccctatttgcagtcttttaatcccttgcccccttccacctttccccccacgtccccaaagtccattgtatcattcttatgcctttgcatcttcatagcttagctcccacatatcagtgagaacatacaacgtttggttggctttccatgccagagttacttcacttagacttcacttagaataatagtctccaatctcatccaggtcgctgcaaatgccattaattcattcctttttatggctgagtggtattccatcatatatatatgtggtatgtatatacgcatataatcacacatacatatgtatataccacagtttctttatctacttgctgattgatgggcatttgggttggttccatatttttgcaattgtgatttttgctgttataaacatcctctgggtagatatccaatagtgaggttcctggatcaaatggtagttctacttttagctctttaaggaatctccacactgttttccatagtagctgtactagtttacattcccaccagcagtgtagaagtgtttcctgatcgctgcattcatgccaacatctactgttttttgattttttttattatggccattcttgcaggagtaaggtggtatagaattatggttttgatttgcatttccctgatcattagtgatgttgagcattttttcatatgtttgttggccatttgtatatcttcttttgagaactgtatattcatgtccttagtctactttttgatgtgattgttttctcttgcttatttgtttgagttcattgtagattctggatattagtcctttgtcagatgtagagattgtgaagattttctcccactctgtgggttgtctgtttactctgctgactgctccttttgctgtgcaaaagctctttggtttaattaagtcccagctatttatctttgtttttattgcatttgcttttgggttcttggtcatgaaatccttgcctaagccaatgtctagaagggtttttccaatgttatcttctagaatttttacagtttcaggtcttaggtttaagtccttaatccatcttgagtagatttttgtataaggtgagagataagaatccagtgtcattctcctacatgtggctagccaattatcccagcaccatttgttgaaaagggtgtcctttcccctctttatgtttttgtttgctttgttgaagatcagttggctgtatgtatctgggtttatttctgggttctctattctgtttcattggtctatgtgcctatttttataccaataccatgctgttttggtgactatggccttacaatatagtttgaaatcaggtagtgtgatgcctccaaattcgttctttttgcttagtcttgctttggctatgtgggctattttttggctccatatgaattttagaattgttttctaattctgtgaagaatgatggtggtatttttatggggattgtgttgaatttatagattgcttttggcagcatggtcattttcacaatattgattctacccacccatgagcctgggatgtgtttccatttgtttgtgttgtctgtgatttctttcagcagtgctttgtagttttccttgtagaggtctttcacctccttgattaagtatattcctaagtatttccatttttttgcagctattgtaaaaggaatgagttcctgatttgattatccgcttggtcgctgttggtgtatagaagagctactgatttgtgtacattaatcttgtatccggaagctttgctgaattcttttatcaggtttaggagatttctggaggagtttttagggttttcgaggtaaatgatcatatcgtcagcaaaaaatgacagtttgacttcctctttaccaatttggatgccctttatttctttctcttgtctgattactctggctaggacttccagtactatgttgaagaggagtagcgagagtgggcatccttgtcttgttcccattctcaaagggaaagctttcaacttttcccccattagtattatgttggctgtgggtttgtcatagatggcttttattacattgaggtatgtcccttgtatgccgattttgctgagagttttaatcataaagcgatgctggattttgttgaatgctttgtctgcatctattgagatgatcatgagatttttgtttctaattctatttatgtggtgtatcacatctattgacttgcatatgttaaaccatccctgaatcccttgtataaaacccacttggtcattgtggattatctttttgatatgttgttggattaagttaactagtattttgttaaggattttaccatccatgttcattagtgatatcagtctgtaattttcttttttggttatgttcttttctggttttggtattagggtgatgccagcttcataggatgaattagggagggttccttgtttctctctcttgtggaatagtgtcaataggattgataccaattcttctttgaatgtctagtagaattctgctgtgaatccctctggtcctggactttttttgttggtaatgttttaattaccatttcaatcttgcggcttgttattggcctgttcagggtatctaactcttcctgatttaagctaggagggttgtattttccaggaatttatccatcttttctaggttttctttttttctttctttttttttttttttgacagagtctcgctctgtcacacaggctggagtgcagtggcgcaagctccactcactgcaagctctacctcctgggttcacgccattctcctgcctcagcctcctgagtagctgggactacaggcacctgccaccacaccaggctaattttttgtatttttagtagagacggggtttcatcgtgttagccaggatggtgtcaatctgctgacctcttgatccgcccgcctaggcctcccaacatcttttctaggttttctagtttatgtgtacaaaggtgttcatagtagccttgaatgatcttttgtatttcagtggtgtcagttgtaatatctcctgtttcatttcttagtgaggttatttggattttctctcttcttttcttggttaattttgctaatggtctatcaattttatgtatcttttcaaagaaccagcctttttgtttcatttatcttttgtatttttttgtttgtttgtttcaatttcatttagttcttctttaatgttggttatttcctttcttctgctgggtttgggtttggtttgttcttgtttctctagttccttgaggtgtaaccttagaatgtcggtttgtgctgtcagtctttttgatgtagatattttggggctatgaactttcctcttagcaccaccgttgctctatcccaggggttttgataggttgtgtcactgttgtcattcagtctgaagaattttttaatttccatcttgattttgtttttgacccagtgatcattcaggagcagattatttaatttccatatatttgcatggttttgaaggttccttttggagttaattttcagttttattccactgtggtctaagagagtacttgatataattttaattttcttaaatttattgaggctcattttatggcctatcatatggtccatcttggagaaaattccatgcactgttgaatataatgtgtattctggggttgttggatggaatgttctgtatgtatctgttaaatccatttgttccaaggtatagtttaaatccatttttctttgttgactttctgtcttgatgatctgtct

SEQ ID NO: 94671 - DNA, 19362 bp, Homo sapiens
tcctctgggggctgcaaaaggctaggccctgcccaatgcccgggagaccactgcaaaggcattctctgcttgatttccagagggcccttaccacaaccccctccccggcccagcagtggaggctttctatggatacaaggctgcctaggtctattcaacaacacaatgagggaggaagcaccaggcaaggcaaacacaaacccagaaggacaggagggctcgggggcaagcctgggattggcctgtcacagcagctgcttcctagaaacccccacaaccatcttctcctggttcatggcattatcattacttcagcaattcaatgaaacagagggaccattatttccatactattaatagcaatgtgctgttgggtcccactaatacccaggaaataatccacagtcaaaccagtagttcagttattattcaactgacctaggaatttcatggatcctgttagccaacaccattccttcaaagtgaggcagcctccccttacacacacgtgccccaactccccacccccattcagaaaactaagttcaagaaactcttttcattaagtcctgtgcctgttctcccttcattcatgagtcacccatttgagtctttgctaacctagaatccggcagaaatacctcacatcatgtgtcctcaatgggtcacccacttctacccggttactacttttagaaggaaacatgaagctccagattggctgcgtcataaggatgtgggcagaacttctaggcttttagtctacataatcccctacaaagcaggtttctgttgtccccattcttctcttcttggcccctgaggacatccacccatacagggaactgctgcaggctcctgagctatgtgcacagaagacagcccttggccagagcgggaagtggggtccagagcgagtcacagacaggccctccctgcccagagtggaggtaccaccagacaggaggagatggccttcccacaagcagtccagactgtgggcagaggaggtgagctggattctcaggccagccattctcactaagaacagaacttctgcacacccccatgtcctcttgcctcgttagggtggcctcctaaatggtgtgtgaagcaccaagatgctgtaggggatgttaaggttggcgtgcttctctcggagggacccagactgtgtgcagggtggtggcagtgtggtggctgacaatcccatctctggcattgcaccaacggaggtcaaactaccagctgagctcaacaaaagtaactaccatttattgagtgcttactatgtgccaggcatggtactaaatgcttacatgcattacctcgttatatcctcacaaccaccccaggaagaaggtactattatcagacccaactgccttcaaggtagaagcttagagcagcctagaaacctgcccgcacctagggtgatttgatcccaaagtctgtcttaaccactgctctcggcctcagtcatactgcctcagtttcctcatctataaaatggagacaacaatacctaatcaaaggctgttttctggattaaaagggataacgtatgtaaacccttagcactatgcctggcacatattaagcactatactattgcaatccttattaataaacacactgatatctcattggctcaagaataaaaagagaaggcgcctcagtaggtaggcatttgatgggaaaaggaaggggagggtgggggaggagacagggtctttaaacagccaacaaatttgaaacccactggacaaaaaaccctagacttcacaaactctgcccctctattctcataaatcatccgcatgtcctcaaaatcccaacacttcagcatccaaaggatacctcctaaactgcactcaaagtgcgttgggaaacatggtccctatacaaacaggtgacagccttaatcaagagacagccccagatgagaacagcctccatccacctgagaggccaggtaaggccactgctggtcaacctgaaagggaagggcgcattcagatggcaacagcagccaggactcttctgagaatagggcccaccttctgcagggatgtggataaggagagtccaggcccaagagaaggtgggccaggcagagccctgagataagaatccttcgtgaccacttggtttaaaccctagcaccccatgcaggttgtggcacaaggcccccacccaacaagagaaactgagtcaggaagtgagagctgttcatctctttaaaaactggaagctgggcagctgcgtgcagggtgatcaagggaaaaggaagtttgttttgaccaagtcagggaagaatacggggctctgcctgagtattagccatcatcttcaggccagagtttgttccacctgctctttggagtccagtgttccaaagcacaagtgagagtccatccgcggcttactgtcttgcaatgtgtccataaaagtcacctggacatcctccccaccctgacctcagaagaacagaaacctgttcaagtgaaattgtcctcccaactccacccttttcttagcacataatcacagtgtgcaagaaaggtgggcccagatatgttactctggaagacaaaagacaatagtgcctaagatattactaaaacaggaaaaggcttcagcagtgacataccacatttagtagggtgatgaaaatctacccccttggacatgcaactaggactggctttgtaactaacaagacccctgcttcacagttttctgagcaaggacactctgtctcaagtcacttatactctcccactacccgactctgtcaatagtggagatgaacctgagctttgggaaacatggtccccatacaaacaggtgacaagggctgagccaagggctcactgacagtgtgaagatctcaactcaaagatccattcaaataaggctccagtcaactcagcaactagctcagaccaaatcacaaggtctgtgtagtctcccttaaaacatatttttgggattttcttgcataatataggtcaagttacagtggaaaaaaattctataaaaatggattcaaagtccacctgtgtaaagtcaaaagttgtatcctccccaatgaaagagattagtttcaaaggatgtgaaactagttctcatacattatagggctgtacaatactaagagtaattacattttaaatgcaaaatactgtagctactaaaatgcccagaatatgaaacaagttgcctaagagggtttcactttcaggagtaaaacataaatggaacctttctgaatactaaaagcagttaagagggcagcatgcgcacacacaaaaggcaaagactcggtaccctgtgagcggtcatgagcagagctcccaggggctggggggtgcccatcagccctggtttctatgacccccttgttccaccaggcaggagccaacagcaatttaagctccaacctggctcaggccaggcctcctgagctagagggaaggaaagctgcaacacctcggtgtactcacacgacgttcacaaaagcaagcagggctgggggaccctccaggtgtcctgtgggtaaagtgcaggatggagtgagtcctgactccaccacactatcctggggaagctccctgcctggtaaggtgctcatgactctcacccgaggtaagaaggctgttgtgagaatgtagggatacaagttggaaagcaaagcaaaagtctctgaatcaggactatgcagtattcatgaatacataaacaaatgagaagcataaaaccatgcatggaagtgataaacagggaattcacgacaagggagggcacacagttgcagtcacattttatttctgaccaataaaaaaaaaatgggtctaaagcaagtgatgccattcatgaagatttgaatgtacacacgtaaaaatggtttcttgaatcttgtctgtgaataggaaagagaaacattgtgctatatggacacaaggtggcagtgctctcctagctacctgacaaaaaatcctcatctccagaaagcatgcaggagaaatcagaaaataaaacacaagctgaccctctggcctgcctgctagcagctctagtgcgcactcagcttcggcttcctagaccccccttccccaccccacccccaccaagtaaccacttccacaaaggaacatgatgagccttgcccagtatgctcggctccctgatcccaaaggcagccctattcaagagcaggtctctgcagccaggccccagctgagactccctcctctcaaggagcccaccatatgcccacaatgggacaaaagagacaaatgaggagccctttcggtatctagtttggtgatccaggttcattcttcaatctgaaaactacagtttcattattgatcacctttactgttcgggtgtgctgctgagatacctactcaccttaaggataagcatgtaagggcctgaaaacacttcctgtttggggggtgcccaggacctcacttaatgagcctctaccggcatgaacttgctcagccagaatcacagaagagtggaattgggagtagctccgaaaaagaggccctggagagtgatgcatcctgccagtgacacagccaatactgaaatgaaagcccttgcgataatatgttttgtttttaaggggccttggacctgaataagagaagccacgaggctgaaatggaaataaaagttcagcggaaagaagccgcttcagccccacacacatatgggaagtcactcaaggatgtgtgagctgaaacatcccgagggctccatcctctgctggacactctagagacctgggctgactgtgcactttcagggaggcagtgaggctaatttacaaacaaaaacaccacaaaccagcactagaccaaggtgcagaagcaaatcattacaccctcgttggcaatgaaaacatccacggcacggaatagtttgatatatttgggtgccaagttctctctcccgcactccatcacttgttggcctgacaaagaactaatctgtcttcccaaagtcaatctcacccctgaaattagggaggggaaaaaaaatcacagtttaagcaaacaacaacaacgaaaggtcccccagtacaatacaaactacatttaaactggtcacattatataaaaagtgtgcatttaatcttcaaaatagtcaaggctctaatcaggttaggttttccatagttttaagcaggactttgtggttttagtgaagaagtcatggtgcaattgaaatcactgtaagaaataagtgacttttaaaacaaacacagacacacacactcctcttaagagtaatatatacacaacacagcagctacatgggtgttcaggcaaagggtgcatgaacgagaagccctctgctccctgcccgatgagaaagtccccagaaaggattcagcagcagcaagtctacagcacaaacatggatggcattgtccctgaaaacacacagttaggtggacctacaggagacattggagcctagacatgtgggaaagggctcagttacagtacattctactgcatacacttgaaatattacagtgtgttttttctccagactattataaataatttttcgtgctttctgaaaaaaataaaaactgaaactttcagtctgcgatgaaggtgaacccatcttataaagcagagcttacttacattctgcaggattttggtgtggatgcatagaaggcttacctggttagtaagcctccattcctccgacctacagaaggcaacccttctgcagctccaagcagggatttctagaaaagaccaggtgtacaaaacatctaagctgtgcctcccaccacaggtggggaagtcccctgatttggtcagacacagatgaatgtctgtgtctgactgagcccagaaacagttcaattgatgggggctggaaccaccaagaaaacactcctgacctgggcaacactgtcttccagattattaatacttttgttttaaaaaaatccaaatggttttacaacccgtgacttctttccaactcaaagctgtagtttacttacaacacaaattctaaacacatagactgtatatacagattttttgaacccacaaataaaaaataccctccaaaaaaaaaaaaaaaagacagtgagttgaagcctcgtcattgtctaagtcacaccagctgggcttgccttggagacctgcccctgctcagttctgttcctgttctcctggccctgggtggcccctactcgtcctctgtggtggatgtcagcatccctttgtcgatcagatgagaccgcagcgtgttgaagatgtggagctgctgatctggccgtaaagtcaggaactgctgaatcagtttgcttgggttagggcctctggaacagaatgtgaagaaacagcactgagctagggcccggaagcttccagggcctgattatctgagtggctgctcygatctctggatcagagagttatctattaacagatgacaggaggcctcagaaaatctgtaagcagaaacaactgaaaactgcattatttgggatgcttttcactggaacttagatgccgctaaaaytctagaattgcaccgtacttaaaaatccaccaacttggttcagatggaaaggtactatacctgataaaactggcgatgtatacattgacaaaggtggccatcagatactggcagtcaaagcgatccatgatgcctccatggccaggaatggtattggcaaagtcctgttagmggcaggggaaggatgggtgaacttgggctcagccactaaccaatcccagcctaatggtcccaccccaatgtcaggcttctgtgctgagtagctgagggcaatagaaggtgagaagtatgaaatctaatggtgaggctatattaggacacaattttattgcattacaaaatgttcttatttcatttacttaataaagacaggagtcttgctatgttgctcaggctactttctaactcctagcctcaagtgatcctcccgccttggcctcttaaagtgctggggttacagacatgagccactgcctggcccaaaatgttcttttgaagaaagatatattaacaaataaactgaaaaacaacgattgcattttcctgaaaatattgttattaattaactcacctaaattcagtgcatgggtcaagatcacacattaaatgccagggtgtacagcctagtattttggagggggcagggaagggggagaaaggcagaagaygggtgagggagtgagatgagaggaacgtaagacggttttcctactttgattttaaaggctcgtttgaatccacttgcraagaatcctccaaaggggccaatgagcgaggcaaaggtggagagagcgatgctgtgaatctggaaggggtacatccggaccgttttctgagaagagtaaatgaagtaaaagtttaggtgcatacatgcccagtgttacggtttgagttgtcaactcatgttgaaatttgatcctcattgtggcctcactgggaggtgatgcctagtgggaggtgtttgggtcacaggggcaaatccctcatgaatggcttggtgcctttctcctagtagtgagttctgtcaagagactagattagcactggcatcccgagggaatgggttgttatgaagtgatgaagcccctggttttgcctctttgcatgtgtctgcttccacctttgaccttctccgccatgttacaatgcagcataaaaagccctcaccagaagccaggcagcagccaatgccacacttctcacacttctcagcctgcagaaagaagctaagtaaacctcttttctttgtaaattacccagccccaagtgttctatcaacactagacagaccaagacatccaacctcgtaactctttatgaaactaattatatacatgtaggttttaaatcaataagaggagtgaatttttcccattttgtaaatttctaatatctaagttaatggaaaacattaaaatattctgcattcaatctgttgcaacatgctgttttggtggaagtatataaagaaaatccagccgtacgcagatacatagttgaaaagagtattttagtcgtagcctcagatggttttgggtattctctgacactacaccagagcttgacaagtagtcatttcttgaatattaggtgtgatatggaatctagaattctatcaatggactttgttctctcttacattaaaatccattggtctatcttatacttgaacggatcttttacccatgcatgactatataacaccatgcatcagccatttagaaaataatggttcactgagttatgtaaatcttccaaatgtagacacatttcattataccgtgtcaaatatgtttgtgttttttctcatgtgatcaacacacacacacacacacacacacacgtacgttaagaatcatcacagacctcatcagaaaaggcttttaagtattaggaagctgtcaagttcacagtggcaggttaagctttccaaaattctaattttcatttgaaagccaaattttatccttggtaacaattactgtcagtcatttttcttttctttttttttttttttttgagacagtctcactctgtcacccaggctggagtgcagtggtgcgatcttggctcactgcatcctccgcctcctgggttcaagcaactcaacctcctgagtagctggtagctgggattacaggcacacgccaccatccccagctatatttttttgtatttttagtaaagacggggtttcgccatgttacccaggctggtctggaactcctgacctcaagagatctgcctgcctcggccttccaaagtgctgggatttcaggtgtgagccactgtgcctagcctcagttgttttctttaaagtgataggctcacttcatccttttcaagaaaaatgtctgccaaatacccaagtctgaaaaattataatttgttggttctttccaagtaaaatttactttcttttctaaaaaaaaagcagctaatttagctcacaactcaaacaactgcacacatgctttccctttaggcaagcactgtactacagtacttagcagaaatgttttacacatactttccatttcagtagagagtgttaaaaaggtgtgtgtacaaaggtcaagatttaacaaaattagtaactttactatttcatagacattcattagaactggcctgtttgtactgtgagtgtgtggcatgaggaacccactgccttaacgcagttttaaccactgctgcttttgcgccgtatcacagcaaatgtcaacacattgaaaaaggaaaataatgtcatagtctaattatgaaacagttgtgacctcacagacccccccaccctacccccgcaactaaaaggatcccagggccctccagggatccacagaacacactttgaaaaccactggtctaaacaatctgatgttgggggaaagctgtcctgcccataccctgacctggcgtgagcaattctccttcatcctggggcttacagctttgggaaggaggaagctagcttttttcagagggcaggtgatggaggrggatctctctttgtagccactgtccatggaggccgctcaccccctgtgagtggcacatacccagccaatgactgactggatcaccccaggaatgttgtactcctgcaggcgaaacaggtccgagggctcacagtccacagtgaagctgttggtgtcattgttgtactccacagggcagacaaagcatctgtacccggacatcacataggacagctgaggaggaataacagagagaccggcaaggaagtaagttccaaccatccagcccagacacaggcacctggtttggccatgttcctgagggtgcctagtaccctgctaactgcgagctatgtgctcagaggttcatgttttaccatacatattttacctcaattaaaaaaaaaaaaagaggctcatgacccaccaaggttacatacaggaacccaaacacccaggccccgaaagaatccgggaaaacctgaagggactggggcaaagaactacaagaagactctccccatttggggagctaggaccactttcctcaagatctctgaagtcagtgataactggagagaggccatggggaaggggcacagtgagaggcagatctcaggaggaacaaggctggaaagcaacaaagctgggcggtgagcactgaagggcagccagacagtgctgaagaaggaggactggcccaagggtcagaagcagagaatggtgctctggaaagggcaggaaaatcacccacctctgggcaaggcacacataggagaaaagctgtgtatctcatcttcccttgggtgcactcaccctgaccttggaacatcaaatgcctgacaagaaggctacctgctgatgtcaccatgcctgggcgcgagagggcatagaaggtgctctccaactgctagcaccctgcctgaaagctggtggatggctggcatggccagtggccctcttcagggcaaggttgccattcagcaggacagtcctggcctccaaagacactctccagstctggacaggccttggaaggtggtatgaggcctctgtccacccaatcccttacacagctgaaagccaccacctaccagaaggccaaacaccacagtagcaaagaagcccccaatgaagccttcccaggtyttcttcggggacagctgtggacagagagcaagttctcagcaaagggtgttttgataactatagctttgcgaacaatgattacttgttaagaacctttctttcataaaaccccattctcttaaccatgtcaccttttaaagctcccccaaatatggtttccttgttccctatcttatatcctcctccctttggttccctttctgtttcaatcagtcattcgaatagttttatattagaaaacgatatactaattaagtgactacactcaaatccagatcaaagtcccaaaaaatgtgtccccaaaaaagattatataaatctgtaaaaatattttcctttcttttttcaagacacgatcttgccccatcacccaggctggagtatagtggcactatcacagctccttgaagcctcaacctcctgggctcaagagakcctcccatctcagcctcccaaggagctgggactacaggtgcatgctaccaccatgcctggctaatttttaaatgttttagtaaaggcaaggcctcactaagttccccaggctgcttttgaacacctggcctcaagcaatcctcctgcctcagcatcccatagtgctaggattacaggcatgacccaccacgcccagcctattttctttattatctttttttttttttaatcagttgtcagtgttttcctttggcctttctccaggaagacatgaagacatggccacaatacaacacagctagatttcttctgtctgccaggctgatctactcacattgagagcaccaccctcccctcacagtggtatttcacattagggtaatccatttaccttgatgagtggggtccgaccaaagaaaaagccaaacatataggccatgatgtcattacagatcacacaagatatggggacaatgaacctagaaatgaaccaaagtaaggatcaactcaagcaaggtgacagtacctcaaaagtacacaaaatagtgccattcttaaattccagcaccaaaatcacccataaaattctggtaacccattaaggagtaagttaaaaacataaaaaataccaaaaaagtcatacctagtacctagcacagagtacatattcaagtgtttactgaatgactactgaataagtggaggttgcaaactaaaaggtcatctgtccttttttcatgataaagaaatatacgtaaacaatgagagaaatttaattgtaaaaggaacaaaaagttttccttctttctcccatccctatctccattcccaaaaataaccacttctaatcgtttctaatttttatttttctagtggttacctccccaattctaaatagtatgctttaatgactctttcattatttactgacttttcttgctgtttattactagctctagttggccctatctttccccaggactgtatttgagtgtgaaaccccaacacgcacagctagatttcccctctgcccactcccctgctgatccagtcatcctcactatgaaagaggtggtttccacacttgttctctctctcctcaccctccactccctgacactgacactttttaaaaagttctttgattacaggtttgtttgtttgtttctgtttttgtttttgagacagagtctctgttgcccaggctggagtgcagtgacacaatctcggctcactgcaacctccacccccaggttaagtgattctcctgcctcagcctccggaatagctaggattacaggcacctgccacgccaccacaccagctatttttttgtatttttagtagagacggggatttcactatgttgcccaggccggtcttcaactcctgacctcgtgatccgcctaccttggcctccaaaagtgttgggttacaggcgtgagccaccgcgcccgccctttaaccttttcactaagatcacctagctgcttcagttggccagtgatttctatcaatgctgatacatgaaaccactgcatttttggaataaaatccactcggtatttgcatattattcccttgacacactgccagattctatttgctagtattttatttagaatgatttatctataatcgtagcagaaatgggtttatcattcctgcttctctctcctcattggctttggtataaaggttagataaaactcagctgttaacccatttggtcctgtttctctttccagatatggaatcttacataattttcaaagctcatttacagttactgatctattcacgttttcttcttcatgacttttagtatatattttgycaggaaatcatgaatatttcctctaggttttcaaatctgttgccatacatgttgcattgtctttgagtctttaaatattcctgtacctattagtctagaacagtggttctcagagcataggtcctgtccagcaatataagcaccacccaggaatgtactagaaattcaaattctcaagcctaccccagatctaatgaatcaaaaagtcaggggtggggtccagcaatctgtgctataatgaaccctgcagaggattctgatgtggctcaaggtgagggccactggcttagaggggggtatctgtacacgagaaacacycacaaaataaaagggaaaatccaactcccaattctcaccagatcattccttcaaataggttgtggataacaagatgtgactgtgttacaacaatcagcaatgtcacatgggtccagccaaactgcaaaaaaaagaaaaataaacactacttaccagtttaccttgaaagtaacttcaaagaacaatcaataccaaatagaaaactgctgagaagcaggtaggaaaaatatctgcttttgtatctgacttattgaaagtgaacaggtaagatcaggcttctgagagtaatactttgtcccccacagcccactagtgagtgagctctcccatgctctgaaagcctgggtatttttcattttcttagtagttattgagcacctggagcactcagagaggagctgttctctagtgagtcagggaataagtggtagcaagtgatgtaccagacaggacatctgtgggcagtgtctgaagcttcagcttgtgccttctctggagcccacctcagggtcctagtggagaggctgcttaaggtgtaagtaacagtgactgggtctaagtcaacgtagagccattaaacctaaatgggcattcttccttcatgctctagatgcatacatatcagaccatgttcctgagttttgatttgtcacagaaagcatgaaaggcttgttgagttcctgaaaaacttcatttaaatcaagaattctgacacacacgcatgcatttcctttaccatgtagaactgcagtcgataatgcttcttgaccagactcagtacaaacatgcagaatcctagtttgaggtgggaggagaaaagaaaaatgaattatgttctgcatttatctttgccctcctttagctatgttaagtggttctttggctaatttattcccagcagctaaccagtgcacaatgtcaaagcccaggggagaaaaacattacccagataaacagtcacaaggaaaaaataactcctcccaaacagtaaaaggaaggcaatattttataatcatgcagaccacactaaacttagaacatggttcatcagataggaatgttttattcctagaacatgggccagcaaacagtggtcaggccagctgcttgtttttataaataaagttttattcaaacacagttatgtccatttgtttacatattgtctatggctgctttcaagctacaactcagcagaactgagtacagtcatgctctgaacaacgaggttctcgtcaacaacacaccacatacacaacaacagttccctaaggttataatacccatagattataataccataagatttactaattaccatatagtaccttttctatgtttagatacacaaatacttaccattgtgttataattgcctacagtatttatttagtaaggtaacatgctgtacaggtttgtactctaagagaaatagactacacattatagcctaggtgtgtaggaggctataccatctaggtctgcataagtacactctacaatgtttgcacaatgacaaaatgacaacaatgcatttccgagaacatagcccatggttaaacgatgcatgactgtaactgcaagagaccctatggtccccaaagcctaaaatatttactgtttggaactttaataaaaagtttgctgcctgttgtgcctacagagtagcaattcttttattcctttactttcttaatagacttgctttcactttcctccacagactcgccccaaactccttcttgtatgagatccaataacactctcttggggtccgggtctggacccctttctggtaacatctttctggtgaaccccaaagggacaatactgaggagacccccaacccaaaggaaatagactgcagcactgattggctgactttggtttttttctgcaatttagactgcttgttcctgtgaaccaaccagtgatctctggctgcagctcagaagaaacaagagggattggtgatgtaaaaatctgaatcagtattctaattctgggaacatattgcaatcagctaccgaccccgtatcagcttggttccaacaattacccagttcatggaaagccttctttagtttacttgggatagttttgcttattttgctttactgatatggaatagttgtactatttgtgtaggaatgcaggataagcttactcaatgttctcttaaacacttacaaaatcttccagatatcactttgtgtccgagctgtgaatagccctaaccatactgacactttctgactgagctcctctctaccctgaatacaagagacctcgataggtaggcaggaatatcattgcccctaatcagcctgaagaagttacagaggatggatcttcgtccctctgcaacccttaggattaagggttctcttataaaagtgatgggggaaatgtcagaggcatttgagctagagcaactccatcctgaataggagctgggtaaaatgaggctgagatctacagggtctgcattcccagacggttaggtattctaagtcacaggatgagataggaggtcacacaagatacaggtcataaagaccttgctgagaaaacaactgcagtaaagaagctggccaaacccctccaaaatcaagatagcaatgagaatgacctctgcttgtcctaattgctacactccaatcagtgacatggcagtttacaaatgccatggcaacatcaggaaattaccctatatgatctaaaaaaaggaaacatgaataatccaccctttgtttagcatataatcaagaaataaccataaaaatgggcaaccagcagccctcggggctgctctaagggccattcttttattcctttactttcttaataaacttgcttccccttaaaaaaaaaaaaaaagtttgccaatacctgtcctagtattcatagggctgggagaagagggatccacatggtatagggtcaagaccacctttttatctctctcacagtgacctagatggtagcacaacatgtccgcagaccccttctccaggaaggaaaggaacctttatccataaacatgcggagatcctcaaaagcagttctgcccagaaataagcatgtcgcttttccagaccccttacctcccactgtggaaggctgctttcggggtctgcagcatactctctgaatatcctcaatggcagcagacccctttgcagattttatattttaatagtcaggtgtcattcacagaagtattgctatcaagctgatcaaaaataggtcagattgacattgaggtcagaacaaatttttcgtgcacctcaaactagctttgaaggtagctatgaaaaaccatcagcattattagaattagtacgtggccttacctgaatgtatactaatataacgctttaatgtttgtgaagttttaatgtatttgatttaatcctcacagtaaccctgcagttttagctctagattacaaaagagctgagactcagaaatattatgttcctagctccccctgaggttgcagagtctacgcccaaatccagtaaaatttccaccatgctacaatgtcacccaaggcggtctcctaaaatgactcccctaaagatggtaagttcctagatgatttttgtttcggtcccactgcagaatctttgccaacaggagagtcaggacaggaccatgctgtgctgttcctcaatggtggctgaaacacaggggcaggtggcacaggccacagtcctgcccctacactctgcttctcttaaaagagctcctacaaggccgggcgtggtggctcacacctgtaatcccagcactttgggaggccaaggcaggcggataagttaaactcgggagttcggaaccagcctggccaacatggcgaaactcggtctctactaaaaatacaaaaattagctgggcatggtagcaggcacctgtagtcccagctacttcgggacctgaggtgggaggatcgcttcaacttgggaggtggaggttgcagtcagccgagatggtgccactgcactctggcctgggtgacagagtgagaccctggctcaaaaaaaaaaaaaaaaaaggtaacagctgctacagcttaacatagagcatcagctctgctcccctgcatggtcacagttaatgtcacaaaactgtatactaaccaagaaattccccaattcctacctgacagacatacaaaaacaatacagacacaagaaatggtgaactgcttaatgcatacctattagatagagagtaaaggaaatgaaccggtggtatttactgagaatccgcaaaggctcttctctctggaccagggtgaagaagtaatccgtcactgtctcaccatagaagaaatagtttacacacaggagaaagtacctgtaaatgaagacaggtcattgccgtggggagcacccttgccttcacagcaaggcagtcagacatcccagaggaagggacagagggcagcagaataccccccacccttgagtcccccgggacagctcacagagcaacaggcagaccatggtttcctgctctctggtgacaccgtaggtgagaaatttatctagaaacagacagcagctttcattcactctccatttctcccaaacttgagactccgtttttgccccttttgtagcattcccatacctaactgagggatccttgaaccatatgaccttcaaaaacacgcctcatcctgcttccccagtctcgtttccactcttcccaacaggaactccttcactcctatcaaaatggtttcttccggctttgccacacctgtctgctgttctcctgcctttttcctgctcctgacattctctttgcttctccatttcttcactccttgctcaaatgccattttattcataaaactttgcatgacctaacatgacatctgcctcccctgcatttatttctatagcaagtaatatgtgattatctgactaagcaattaatgatgcatctgcctctctgaagcctggctctgacaaacagaccttccattagcgttaactcttcacttgtgtattctctctcctcaactggcgttcatgagaagagaagccatcccttgcagcctccacagtactgctgagtatggcaccatgcagccatcactgcaaacccccagcaaggatcctgagatagagaagaaagtggagagcttttctttcccattcttttttttaaattatgaagtacaaaaactcccatattgggtttcttttctgttacatggaaaaaactttctttgtaaagtgaccacagccaggagtcaggcctcctgagtatgttaacaaaatgcaaaacactgctttccagctaaagaacagccacaaaagggacctgcatcttaagccaggtggcaatcccaattccatctggaggctgggaggcagcctgtctgttgggtgacaggaaacacctcaggaagggggtgcccagcctacatctgagcacatcggcttccttgacagtgaccaggttgctggggcaaaaaccactgctctccagccggctaagtcatggcttcaacccctgtatccctgcacagtggggtgagaaggtccacatttgccccaggtcctctcagcatggtgcagtgctctgctcaaaagtcaccacctgagaatactacggccaataaagcagagtttcagatcagaaaggggtctcagacatgtgttacaggtttttctttttgctttaagaaagctgaatcctttcccaggaaacggagaaagccaactttcccagcggagcccagatcccatgcattcagcctcactcctgcccactctggcactcaaaacacctctgatgaagtagggctcaaacaccacagtctggaaaccagtaagtctcaaccatctgtcttagagataaggaaaccaagttccaaggataacaagcaaagccggcagcagaacctaacaacttccagacaactctagtgggatgctgagatatgacggcatgaaaaatatactgatctagaaaaacgggatcatcatgcagagtttaaggaatccaaatagcgaggcaaacacagtcacagaatgcagcccatct

SEQ ID NO: 94672 - DNA, 76844 bp, Homo sapiens
tacagctgagtcaaagagcgtacacatttaatattttttcttttcttttcctttctttttgagatggagtcctgctctgtcatccaggctggagtacagtggcgcgatctcagctcattgcaacctccgcctcccaggttcaagtgagtctcctgcctcagcctcccgagtatctgggattacaggtgcctaccaccacccccggctaatttttgtattattattattatttttttttagtagagacggggtttcaccatgttggccaggctggtcttgaacacctgacctgaggtgatccacctgcctcggcctctcaaagtgctgggattacaggcgtgagccaccacgcccagccagaaattttcaattgttacaggatggacaggatttgttgtttctctcttgctttcttcacaccacttctctttagttacttttaataccttggtcagcagaattctttagtttttctaccatgtatctaggtatggagttagttttatttgtcttgttgagggaactgaagattcatttcaagtctgacatattctcaatcattatggcttcaaatatctcctctccttagtctattctttatctctggaatgcctttctttccttttttttttttttttttttttcctagttcagctgtgactccatacaaggttctaagatgagtttcacagtctcttccctggattttgtggagacttaactttacccttctgtatcagcctcttaaagcactgggtcagccttaaaagggaacaggaaagggcatttctattataagatgccttcaattgtaatatgtaccattattttatgtagcacaagcaagaaaactgtcaaacttttttttttattattttctagagaggggagtctccctttgacacccaggctggagtgcagtggcaagatgactactcactgccacctccaacttctaggctcgagagatcctcttgccacctcccaaatagctgggactacaggggtgcaccactgtacctggctaatttttaaatgtttttgtagagagaaggtcccactatgtcgctctggctggtctccaactcctgggctcaagcaatcttcccaatcggtctcccaaagtgtgagattacaggcatgagccactgtgcccagcctcaaactgttacacaatgctttatcacttagaatttctttttttttttctttttctttttcttttttttttttctgagacagagtctcactctatcacccaggctggagtgcagtggtgtgatcttggctaaccgcaatctccgcctcctgggttcaagcaattctcatgcctcagcctcctgaatagctaggattacaggcatgcgccatcacacctggctaatttttgtatttttagtagagacggggttttgccatgttggccaggttggtcttgaactcctgacctcatgtgatctgcctgccttggcctcccaaagtgctgggattacaggcatgagccaccgcgcccgggtctattttgttttaaaagaacttttagactttaaaaacattcttattatatattactcttgtgcaaacatgaaaaaatttaagctacattggttaaggcattcctactgtttctccactcagttagttgctgattctgctgtttttctgtataatatcctactctgtgttgtcaagggtattgatgatgcagtatttttcaatagtgctattctattgtctctggaatttcttgcaagcctctgctactcatttgtaagttttgatgttggcactttcttgctttatgtgtgatggactacccatttgcatacatctcaatatcaaaacataatacagcatcatctgtttgtggttcttttcctttcttgggtccgttaaaatctcagttcctttgcaaaatgtggaatgtgttccttcctccagtgaggaacatttgcttcactaaaaacaaatgcatatgctccactactctgtttcagttctgtctgcttacataataacattttggtttaatgccaaattacatgtaatagatttgaagacattttaaatgacaaactctatccatgggggatccaccatgtacatcaatctgtttatttctgctctattacagaagtgatgtcctcctaaaagtgtcaaatgataaagaggtgtacagttacgtaaattttatgttaaactgaaatgaggacataaacatgcctatgactgtggtcagagaaggcctctctgaggaggtagcatcttatcagagaagacagctgcttggagagttggaaaaaagcattctaggctgagagaatagcatgattataaaggtcagcatacttggaatatattcagacaagtttgatgtagaactcagactgatgtgtctgaagcaagagtggtgcaaggtgaggttgcagagaggctggggtgagctcttgcaggactttgtaggctctctaaaagtgcaagggaatgtggtcaacagcagatctttgatgtgatccaatttacattttaagtggctactctaacatctagtaaaggtactattggatcagtgggagaaagaatgaagtaaattttgatcagataattggttaaactattagaaaagaataaaagctgtagacttttctggatgggcgcagtggctcatgcctgtaatcccagaactttgggaggctgaggtaggtggatcatctgaggtcaggagttcgagaccagccaggccaacatggtgaaaccccgtctctactaaaaatacaaaaattagctgggcgtggtggtgcacacctgtaattccagatactagggaggctgacgcaggagaattgcttgaacccgggaggcagaggttgcagtgaaccaagattgcgccactgtactccagcctgggtgacagagcaaacctccatctcaaaaaaaaaaaaaaagacttttcctaataattattcactaaattctagataaagaattcaaattcaaatcttgacccaataagaaatggaaaaatattttggtaaatatttatgagatcttcctatgggcttccaaacataagaaaaaaacccataaaacataatgaataaccatacaagttttaagacttcagtatgcctcaaaggattatattggttagtatagtttaggtttcagtgacagagaactcaacttgaatggattaagagaaatagaaaatttattcatctaaacaaaaagccagaggtatctggcctccactgtccagtcctagtcttcataaacgtgaagtttgttagccacattaataagcaaagaaatgtaaattcaatggagacagaattttaacctaccaaattaataaaaatcatgttaacacctggtgtgttaggaaggattcaaggaagtaggcacttaaatacattgcaagtgggagtatacattggtataatttttctggtggaaacttagaaatgtgtatcaaaagccttagaattttacttattctttgacacagaaattcgatctctagggttttttcctacagaagaaatcaggggcatttaccaagatcaagcatgcttaagaatgtttcttgagccaggtgcagtggctgatgcctgtaatcccagcactttgggaggcccaggtgggcggatcacctgaggtcaagaattcaaaaccagcctgacctaaaacccctgtctctactaaaaatacaaaaattagccagctgtggtggcgggcgcctgtagtcccagctactcgggaggctgagacaggagaattgcttgaacctgggaggcggaggttgcagtgagccgagatcacaccattgcactccagcctgagcaacaagagggaaactgtctaaaaaaaaaaaacaaaaaacaaacaaaaagaaaacaaaaaacgaaaagagagagagagaagggctctaaagctggcctaaagccctattagcatcacttccaccagacccctgttcgtcacacagtactgacttcaggaatatacttgatctgagttccattaacctgagagggctgagtgtaatggatgagaagtttgttcagaccacatgttatccatcctagtaatcatactgtgcattctataattctgacttatgtgcattgattctccaagcctccttttattaggctggatttgaaaaggagcagctgagtttctagaaggactgacatgacactcacttagatatgacctttcatacctacgtgcccctgaaggtgaagttctagacactaacatcttcacctgtcttagaagatcatcttgctcgagtgctgtggctcatgcctgtaatcccagaactttaggaggcctatgtgggaggattgctcgagcccaggagtttaagaccagcctaagcaataaagtgagacttcatcgctacacaaaaatttaaaagttagctgggtgtggtgctgcacacctgtagtccaagctactcgggcatatactcatatagaaatcaggaatatataatgctgttttcagaattctcactacctgccccaaaactcacagctcaggtcaaaattaccaataggaaattttagccaggcatggtagctcatgcctgtaatcccagcactttgggagacctaggcgggaggatctcttgaacccaggagttcaagaccagtctgggcaacatagtgagaccctgtctctaaaaaaaggagaaataaattaattaaaatttaaaaattgaaaagaagaaaaatgtaaaattatatttttttaaaaaacgaaattgcaattcttttgtgtgcaagtgtctcattgtgagattacagtatgcttaagttggggacgcagtgttatatgtgttttacatcacttacagggcagtgaatagaaagaacaggaaacaccaaaggcaatgctggagcaacacaagtattaataaatgcaggcaggcagtatagtatggtggttagagtgtgggctggtaacaaacctgtttgtgttctaattcttactaggcactttctagctgggagaccttggctaaggtccttttaaaagttttaaatccatccaacaagtacttacaatggatgtgtcaaagacatagaggatgcacagtaaacaaagtagacagcacttctgtcccaaaaaaggtctttccatagtccagaagacaaatttgaaaaactgaggaagggccaggctcggtggctcacgcctgtaatcccagcactttggaaggcggaggcggacggatcacctgaggtcaggagttcgagaccagcctgaccaatatggtgaaaccccgtctctactaaaaatacaaaagttagccgggcgtggtggcgcgcaccttggaattgtttgcgcccgggaggcagaggttgcagtgagtcgagatcatgccactgcactccagcctgggcgacagagcgagactccgtcacaaaacaaacaaacaaacgaacaaacaaacaaaccactgaggaagatcttaactgtaaaattcaaatcatacccacttccaagccatgtgtggattaaacgagataagccaactaaagcgattactcagctcagtgcctagtatacaattagtgcttaacaagtactagcgaccgcttggcaaagcaaagcagactgaagcgtgggtttcatttctcatcatgtgataagtgataaaatgctcttaaccaggtcggctcacctggcctttccattcgacctaaataacgtctacttacttgcgtaagggaagagctctggcccaggtcagcaagcatttgtcaggctagagcctccgggtggcgcttctcgccctcagtaaccggttacctccagaaccagggcgccagctccggccatccgcggttaagcgggagctcccattggctaatcgcacactgaaacgcacgccttttcccgcccctgacgctgccgtccaatgcgcgcctctcgactctgctccgccccgccccgcccccgtcgccctgcctccctggcgtatttgcgccattggtggatattccggaccgtgatggtggcgctgcgcgtgcgcactcgctccgagccctgctcccgggagagggagctctcgggtcggggctagggaaggctgaccccgctcggcccgggtgaaagggcggtgacggcactgggtggggccgagctccagggctggctgctgggctgctaagggaactgtgagccgctcagagccgcgcgcctcccgggcggggcgggsccggccgtgggagtccgcgcgtgcccgcgccgagctgcctgctccggcggcttcgctgctagctcgcggcgacgtcgggccgattttcccaggatgacagagctgaggcagagggtggcccatgagccggttgcgccacccgaggacaaggtagcggcagcgtmggggtgggcgcggccgggacagcggcgcatccgggaggcctgcgggggacgcgcgcagaggggtcgtcttgttctctgaccctttgtcgcagccgacggcggccccgggcccgggtagcgcgaagggccctcgggtgcccggccttcgcggcgcgcgcgtcaggggtcggcgggtcggggtcccggctcagggtctgactgaagtggctcccccggggcgcaggaaggagcttctcgggagtggcgcacggcctcctgcctcgctgggctggctgcggggactcccctctcccccaactccgtgaggccttcctggaggtgaagatatgcagagccttcttagggaggcggctcctctgagcgcaacttaggctctccgttcccttttacaatgttattattttggggggtgggggaatcaggacaaggccatagcatttgcctcctgggagatgtaaatcccttcttgggcatgaaatcatcggctttgagcaaaggggtgttacccagtgagccagtccgtcatcagcaggtgttggagggcgtcctcccggttgatgggttgtttcctgcaccgtgtgggctctggtgggtaggggaggagagtaggaaggaggccatcttggcggggacagtggcgggggtgacgggtgggggagtggactcctttgggtgaagtgaaagatctgtgtaggggagttaaggaaggtagggattggttttattactgtggaggttgaatggcagtataggactttgtagcagtagttgtgctttccgagatagcagtgatcaggagccctgtgtttgggaaactgatcagacagtgatgtgtagaagggactgagggagcctggaccagactgagggagcctggttcactcgggattgcccatgagtgacctgtagatgttttctttggcccacatattgccttaaaaatcagaaagtttctcctaacaatctaaatttcttgcctgtcttagataattggagggtccaccatcactttgtcacctgmtcaatggttggctggagctgaggatcatcggttcccaccaatccctgttgccttacaccaggctcacggcttcccctaatgcagcctgtaactttttgatgactggacgcaacggacattagggagacacccagaaggaagaaagcacaagatttggtgacaggatgtcaacagagcagttacactaggaggaatgtttttggtgaaagataatgagatcatgggttttttttaaacaactttcgtgttattgcagttgacagtggactatccaaagagaactgttcctaccgatttttagaacatatattttggccaggcacagtgctgctcgcctgtaatcctagcttctagggaggctgaggcaggaggatcgcttgagcccaggagtttgagaccctgtctcaaaaaacaaaaacaaaaacataytttggagaamatttagggctggggctgaggatttagcagtcgcttgcagagacaagatactttgaagtctctaatttttcatttggctatcctggttcagcctgaaagaattctgacttaccttgtactactagttggtgagyatgcagatgtttggaggctctgtagctctgtttaagggtgagatcatgcttgatgttagtgggactttgtggacctagaaggtgtgaggagagagagaagaaagaaggcrtgatagctggtgggccatgtttttgaaaagctaactatgtacaataattagaatgtcaaaaaacaaccttgggattatgagatgcaacataaagattctaccctccttcccggactcgttggatccatcccccagagataaagtgcgagttgaaccgtcttactttcacatcctgtactttagactgggaggacctgaggagctgtccagctagaggtgcacttatatcacttatacagtgacagaatgcctggggtcatgaggtccacttgtggcgtgttgtttcctaaaagacagctgctatgcactctgttaaaagcctgatgttcattaccgagaacaagacaatcagttcctcaccccattattcagaacttctcaattgtcactgaattgtcatgtatgggattttattattattatttttttagacggagtctctctctgtcgcccaggmtggagtgcagtggcacgatctcagctcactgcaacctctgcctcccaggttcaagctagtctcctgcctcagcctcctgagtagctgggactataggcatccgccaccacgctcggctaatttttttttttttttttgagagggagtttcgctcttttgcccaggctggagtgcaatggcatgatgttggctcatcgcaacctctacctcccaggttcaagcaattctcctgcctcagccgcccgagtagctgggactgcaggcgtgtgctaccatgcccggctaatgttgtatttttagtagaggcacggcttctcaatgttggtcaggctggcctcaaactcccaaccttaggtgatcctcccgcctcagcttcccaaagtgctgggattataggcatgagccactgtacctggcgtttttttttttgtatttttagtagagatggggtttcactgtattggccaggctggtcttgaactcctgacttcgtgatctgcccgcctcggtctcccaaagtgctgagactacagacgtgagccaccacacctggccatgtttgggatttttaataagggaacattttaaaaactgtgaaatctattatttgtctttgaatgtatatagtaaacttttgtttgttggtttgtttttttgtttttttttgagacagagtttcgctcttgttgcccaggctggagtgcaatggcacaatctcggctcactgcaacctccacctcccgtgttcaagcrattctcctgccttagcttccccagtacctgggattacaggtgcctgccatcacgactggctaatttttttgtgtttttagtagagacgaggtttcaccatgttggccaggttggtctcgaactcctgacctcaggtgatctacccactttggcctcccaaagtgctgggattacargtgtgagccaccgtgcccggcccatagtaaacttttaaaaaatcctgatttattctgtttcatagtttgggaaacacctacttccatgactttggctttgccaatattcttgtgttagaacccaaggaaattagaaataataaattttaaggaaatgcattatgaaacaagaactttttaatttcatagtagaagaatccagtgaacaattttcaagtcagtgctttaaaagctctggaataggctgggcgcggtggctcaygcctgtaatcccagcactttgggaggctgaggtgggcagatcacctgaggtcaggagttcgagaccagcctgaccaacggggttttagtagaaaccccgtctctactaaaaatacaaaattagccgggcgtggtggtgcatgcctgtaatcccagctactcaggaggctgaggcaggagaatcgcttgaacttgggaggcagaggttccggtgagccgagattgcgccgttgcactccatccagcctgggcaacaagagccaaacaacgtcttaaaagaaaagaaaagctctggagkctgggcgtggtagctcacgcctgtaatcccagcactttgggaggacgaggcgggtggatcacgaggttaggagatcgagaccatcctggctaacatggtgaaaccccatctctastaaaaatacaaaaaattagccgggcgtggtggtgggcgcctgtagtcccagctactcggaaggctgagaggcaggagaatggcgtgaacctgggaggcggagcttgcagtgagccgagatggcgccactgcackccagcctgggcgacagagcaagactctgtcttaaaaaaaaaaaaaaaaaaagctctggagtaaacttgaaagattcctcaaaatgttacagttgcttaactgctgtggcaaaactgtcttgtaaatagaaaatcattagtatcaaaataatctggagcatgtttatttataaaagtcagaaggtattttgttatatttagcatctgagaatggaattttcaaagccaattgctaataaaggaaatgttctcctctgggaactgtgcttatrattttaaagtcccaaagcacmgtatagttgccaaactaagaaacttggagtttaggctttgggaatgatcctcttcctacccaaccatatttttctgatggagcttaggaaagcaaaggatgagatatggtctgaaagattggcatcttaaaatttatgattgagttggcatttcaggagattttgtttcggaagttagcgtataggttctggggttttctgctttacttaattgctgaagtgctatttaaattagagctttacttatttcaaggcttcctttctagatagatgaaacccatatggagaggaaatagtgacatcatttagaaaggggagtttaaatcttaactgaagatagcgtgtaagagcaggggcttgggtcagttacatctaccttgagcctgggctccgccacataaaggctgtgtaactttgagtagatcatggaagttgtggcagcctcagtttgtccatcattaaaatgggggtcataaaattgtatgtgctttacaggatattcatgtggattaaacgtatgtatgggctgacagcagagcttgtcacataatatgttagctatgttgctactgattaaaatagatttttatagaaaaaactttaatattcatcttacacacttgaaaggtgattaaatcttcaagttatatatatttgtagaacctattcatattcattaccttttaaggaaagttttatagaaaggacttagccttctatgacctatcttcggtttattttcaattttaatttttttttttttgagatggagtctcgctgtgccacccaggctagagtgcattgatgtgttcttggctcactgcagcctctgcctcctgggttcaagtgattctcccatctcagcctcccgagtagctgagattacagtcacatacctccacgcccaactaatatttttatttttagtagagacaaagtttcaccatgttggtcaggctggtctcaaactcctgacctcaggtgatccacccgccttggcctcctgaagtgctgggattacaggcgtgagccaccgcgcccggcctctttttggtttattttcttgtggaatttttcagtactccgaatcacaggctttaactgtagaaggaccactgaacactgttgtatgcaattaccttcttttataattaaaaatggttttcaatagactttgagattgaactactcaaataaaatattaaagaactataactacttcaggtataagagaaatgcttaatttttttcaagaaaatttttttatgttgagaaataatttaggaattaaaaaaatcagtaaaccttaactrtgattcccaggcttaacagggagaggaggtgaaagattattttctcatataaccaattattttatgtttcttatttttgttgctcaaacagtatgattttattttaaaaactcaattastgcatgatttttgactatttaaaattagtttttccaaaatctatttttaaaaaatgttttgtgtttgcccaggttaacatggtatttcattagaagaatttttatcggccgggcgcggtggctcacgcctgtaatcccagcactttgggaggctgaggcgggcggatcacgaggtcaggacattgagaccatcctggctaagacggcaaaaccccttctctactacaaaaaaaaaaaaaaattagctgggtgtggtggcgcccgtagtcccagctactcaggaggctgaggagaatggcgtgatggcgtgaacccgggaggcggagcttgcagtgagccgagatcccaccactgcactccagccaggaggacagagcgagacttcatctcaaaaaaaaagaatttttatcatctttaaaaaatgttaaattgctctccttggttgttaggactagaagggactttaaaggtgttttttatttttaggaacagggtctcaccttgttgcccaggctggagtgtagtggcacagtcatagctcactacagctttaaactcctgagctcaagccatcctcctacctcagtctcctgagtagctcaggactacaggcctgagccatggcacccggcttgaggtagttattttatagaagaggatgccacagctcagagagtttaagttattagctcaagatgacttagttggttagatacagaatggttcgtattatgaaggtcttctatttatttattttttgagacgaagtttcgctgttgttggcccaggctggagtgtaatggtataatctcagctgaccrcaacctctgcctcctgggttcaagcaattctcctgcctcagcctcctgagtaactgggattacgggcatgccaccacgcccagctaattttgtatttttagtagagatggggtttctccatgttggtcaggctggtctcgaactcctgacctcaggtgatactcccgccttggcctaccaaagtgatgggattacaggcgtgagccaccgcgcctggcctatgaaggtcttctaattcccggttgttgtttttyatttttttctcatagaattaatttacagactttaaaagcttctttattgattaacattgatagatatgatacccaaatattacctatttttcttatttggctacaaaatcaaaaaaatactatataaatctttcaaaatgttaaatgttaaaaaggtctcagagtaaatgtggagactctttgcagaaaaaaatgtatgtgttttatagagaaagttgattagtttcagttttcctggttatcggatgactgtgatttagacatttgtgagcactttcctgggagtggccactctggtatccttgaaaggcactcccggcgcagtgcttgaagaccacaaggcgccttacccaggcagtgggtgagggtgcttggaagaaatgctttccagttaatgactgttagcatgagaaccatttgttctagtaataagcagtcattcagtattcaacgcttctctttagaacattcactgactgtagggtctgctatggacggtgtctgtatttctgagaggggctggtgttatcagtgttcataaggatattattcagaattttattgcctgttttgactccacataatcaattttttccctactgatttaaagaaataatacaatcttttttaaatcaataatatttaagagttttatttttatttatctatttattttttgagatggagtttctctcttgttgcccaggctggagtccaatggcgtgatctcagctcactgcaacctctgcctcccgagttcaagtgattctcctgcctcagcctcccgagtagctgggattacaggcgcccaccatcacacccagctaatttttatatttttagtagagacagggtttcaccatgttggccaggctggtctcaaattcctgacttcaggtgatctgcctgccttggccttctacaatgctgggattacaggcatgagccaccgtacccagccgactgcatatttaaattggtaaggtagaaaatgagcatgagagtctaacagctgatggatatgggaacataatacttgataaaatcattcagaatatgtttgataaacaagaagattgtataaaacctgcactgtcctactaatgtaaagcatttctcctccctcactttattctcaaccttacaactgccagaaattatataatcttgaatatatttgagaaactctttttaaaatgaatcttgtaactaatttcttttttgaatttatatatataaatatatacatacttattttataatagagacagggtcttaaaatgttgaccattgaactcctgggttcaagcgatcttctcgcctcggcctctcaaagggctggtacagcgtgagccaccgtgcccggccattgtaactaatttcacagggcagataatcatcctttaaactgtttgaaaagatttgagtgttactrtttctggttttcacacttttccatcttttctaggatccacgtaggtggaggagattcctctccacagtttgttaagctacattctatgttgttaaggtctcccagcccttctggactggcactagaggctgttgggggtgaaaaagtacagctgtttgtgtgtcatactgcctctggttcagaaaagagacggacactgactcttcactattaattttgccaaagtctccttgaaagaatgctaatttgttcctggcaytgggcagggttcctgccttccaagtcttgtcatgtggtggttacttggctggggtaatagtgaggcaccccctccccacccccacgtatggtccccaccgggcagcttcctatgccagtcactgatatttgttctcatgttgtttgccccaacagtagggatggcattgagcccactaagttgactgaccttttgaagaaagttaaactttatggtgttattttgagtaggcagtctgtggtgcagaatttgtaggcagcaaagggtattctgtgaagtttcctttctcccgcctgcctctccccagggacagcctcatgccacactgtggttctcatgagcactgctgtctgtgtggaaggacctgacctgtcctaccaaagtcagacatctttttgatttgttgtctttggcagaagctcytttgtattaaggtctccatagggccagcttggggcttctctgtaaagactttgctgaggttttgagagttcctgggacttgggatttacgggcaacactctctgcccctgggtctctgatgtggagaggatgtctgccattgacaccgaacccctgagtgggcaactctcagagccatatctccacagtccatgcctggctagtcctrtggtttcagtggtctacaagacattcctaggtgcatgcccttcagtccacacaaactgactttgtctcaaatctgaattctctcattctactcttaccaccctccttcagtttctttctyctgcgataaaatcccagatgactcggttactcaggcttgaaatctcctattcctttgttcccgtgcccagggcaggatgcagattctaaccaggtgtgacttggaatccttatctgtttgttgtttgttgtctgtttgttgctcttggagacttcaacatttcaggactgcagtattgtaaatgcctgcagtatcctaaatccgaattccttacctctcctggaatccttrtctgtcttttactctttgagatttcccaaatttcaggatttattgcttgccttattgtaaaccctgtgaattgagctccctcctgttaggatttgctctaggtccctcctaatccatcttgttctttgtatctttcaggagttctgaaactgccctaataattattgggggggtggggtggagtgatagaattctggctctttttcataatgcttaaactttaagatcctttgtagtcttctgtctctcatttccttccaattcttgttttaggttcaggggrtacatgtgcaggtttggtacacgggcaaattgcacattgctgaggtttggtgtacaaatgattttgtcacctaggtagtgagcatagtactagatgggtagtttttcaatcctcaccagcctcccactctccaccctcaagccctggtgtctcttgttcccctctttgtgtccatgtgtagctcccagttcactctgcaagtgagaacatgtagtgtttggttttctcttcttgcattaatttgcttaggataatgacccctagctgcatccatgttgccacaaaggatatgattttattcttttttatgtagccttctctcttaactggcctttctccctgcttggtgcctctgtgtcatggatcttgattcttgctctttcctacctctgaaatgtgttctttctgtcaccctccctcatttctaccctttttttttttttgagatggagtctcgccctgtcgcccaggctggagtgcagtagcgtgatctcggctcactgcagcctccgcctcccaggttcaagcaattctcctgcctcagcctcccyagtagctgggacaacaggtgcttgctaccacacttggctaatttttgtatttttagtagagttgggtttcaccatgttagccaggctggtgtcgaaggcctgacctcaagtgatctgcccgccttggcctcccaaagtgctgagattacagacatgagccaccacacctgacctttctacctatttaagtcttattttttcaaaaattatctcagagcatctctggctagaagagacgtaagcatgtattattaaaaattacagaagtaggtctctacaaaaatattttttaaaatttgctgggcgtggtggtgcacgcctgtagtcccagctacatgggaggctggggcaggaggatcacttgagcccaggagtttgaggctgcagtgtagcccactgcactaccataacctcaaacatttatcatttcttttttgttttttttttgagacggagtctcgctctgtcgcccaggctggagtacagtggcacgatctcggctcactccaagctccgactcccgggttcacgacattctcctgcctcagcctcccgagtagctgggactacaggcacccgccaccatgcccagctaatttgcatatttttagtagagatggggtttcgctatgttagccaggatggtcttgatctcctgacctcgtgatgcgcatgtctcagcttcccaaagtgctgggattacaggcatgagccaccgcgcctggccacatttatcatttctttaaattttttttttttttttgtagaaacaggatcatgctgtgttgctcaggctggtctcgaactcctggcctcaagtgatcctctttcctcagcctcctaaagtgctgggattacacatgagccaccatacccagcctcgagttgatttttgtatatggagagagataggatagggttctagtttcactctttggcatatagatatccagttttcacagcaccatttattgaagaggctgtccttttcccaatgtgtgttcttggttcctttgtggaaaatgagttgactgtaaatgcatagatttatttctgagttctcagttctgttctatttgtctgggtgtctgttttaatttaatttaatttgttaattaattttatttatttttgagatggagttttgctcttgtcacccaggctggagtgcaatggcgccattttggctcactgcaacctctgccctccagattcaagccattctcctgcctcagcctcccaagtaactgggattacaggcatgcaccaccatgcccagcaaatttttgtatttttagtagagacagggtttcaccacactggccaggctggtgtcgaattcctgacctcaggtgatccacatgccttagcctcccaaaatgctgggattacctgggaggctgaggcaggagaatcgcttgaatctgggaggtggaggttgcagtgagccaagatcgcaccactgcactgcagtatggttaaaatgaccgtactacctaaaacaatgtgcagattcacagatattttttaaatcctgaaatctgtatgggatcacaaaagatcccaaatagccaaagtgatcccaagcaaaaagaacaaagctggagacatcacactacctgatttcaaaatgtactgtgaagctatcgcaaccaaaacaacatggtattggcataaaaacagacacacaggctgggcgtggtggctcatgcctgtaatcccagcactttgggaggccaaggtgggtggatcacttgaggccaggagttcgaaaccagcctggccaaaatggtgaaacctcatctttgctaaaagtacaaaaattagcccrgtgtgggagcctgcacctgtaatcctagctacttgggtggctgaggctagaacttggatttgctagaattgcattgctagaacttgggaggtggaggctgtaagtgagccgagatcatgccatagcactccagcctaggcaacagagccaagactctgtatcaaaaacaaacaaaaaaagaaatgctactgatttttgtatgttgtttttgtgtcctacaactttagtgaattagtttatcagttccaagagttttttggtgtttttcagtttttctatatgtragaccatgccatttgcaaagaaggatagtctgacttcttcctttctaatttggatgctctttatttctttctcttgcctaatttccctggctatgatttccaatactatgttgaataagattggtgaaagtggacatccttgtcttctagtgcttagaggaaggctttcagcttttgcctattcagtatgatgttagccttgggtttgtcatatatggcctttattatgttgaggtaggttccttctgtacttaatttattgagagtttttattgtgaaccgttgttgaattttacaagtgctttttcagcatcctttttttttttttttttgagatggagtctcactctattgcccaggctggagtgcagtggcacgatctcagctcgctgcaacctccacctcccgggttcaagcagttctccctgcctcagcctcacgagtagctgggattacaggcgcctgccaccacgcccagctaatttttggtattttttagtagagacagggttttgccatgttggcgaggctggtcttgaactcctgacgtcaggcgatctgcccaccttgggttcccaacgtgctgggattacaggcgtgaaccgctgcacccggccagcatcaattgaaatgatcatatggtttttgtcctttattctgttgatatagcatcatttttattgatgtgccattttcattttgtggctgtatctcaccttattgaaccaagcaggcatttaagttgttttaaggtttttgctattgtaagtaatgctgcagtatggtattcttagataagtgcctttgtttggaactgctgactcaaagggatgtactttgtttaggttttgatacaattaatatattcccttctgcagtaaatttgtagccactctgaatgcctgtctttgtgatctctcctccctgcagagtaatactgagtattcacttgtttcttgattttagcagaggcattttagtctactgattacaatcataaactcaggagttggactccttggtttatagcctagttcaatcattaagttgtgtctgttttctcacctgaacaatagggctgagaatactatcaaccttatagggttgttccgaggcattatcatttctttcctttacaaattgtgtcttagagctcaagtagttgattagggaaagtttctcttcatagaatagatgatgaagtgatataattaaaatacttaaaatttccaatccccaatgaattgatagaatgaggcagtaatcatcaatgctgctaccatcacagaaacaaccaaatactatgtacctcctgatggagaaatcttgtcataaaatcatatttgagcttgatcaagactctagttctaagtgctggtttataggaaattcaagagactgaagawcacatggacctggttgctttagtaaataagtgtgtgtgtgtaaatttctttttccatgtctgtgatttcctggcttataattctgaaagcycttattaaagtctcttgttataactttggggcacttggaaactcagaagcaggcctccaaaaataaaatctccctctctgaccatctcctcctcccctttctcctgctcctttctctccccaaggcaggaatcttctcctgcctttctatcttggagctggccataaaaaattatctggctttccttgtttgattgctataagaccctcatttcaaaaccctatatcctggaggaaagactgctgcacagggaggctaagaagaatctgaacagacaggccttgctgggtttccccacttagtctattagtattagatagtatcctttttgtttagtcacatttctgcatggttgtccatgcaatgtgtgcatctaatgaagtctctataaaaggctttagaggacagggttcagggaactcctgagtagctgaacatgtggaggcttacaggaaggtgaacacatgctgggggggtggtgcaccccagctccactgggacagaagctcttgcactggagactccgaagctcttgcaatggggactcttccagacctctccctatatatctcttcatctggctgtatatttgtatccaatatgcaaatattgtatatttgtatccaatatacaatattgtattgggtggggggtgatggggactccagcttgaaactggtagatcagaaattcttgagcctcagatctacaactgatggaaaagagggggtggtcatgtgggactgagctctcaacctgtggtttctgaagctatctctaggcaaatagtggctgaagtgaattgaattggatggtacccagctactgtccgctgcagaattgattgcttgttgagtgtgtggggagacatccaaaacatttggtcacagaagtcttctgtgattgttgttacagtgtgagaacagagggaaaaaaaacgagtttgagttttaccactttcacacactactctctctgatttcaaaaaacatggaagagtggggagtgatagagatagatatgaaaggtaaaacatatagattaaaagactttaggtgctggttcacttgtgcctgtaattccagcgctctaaaggctgaggtgggaggatggcttgaggccaggagttcaagacaagcctgagcaatagagtgagaccctatctcctaaataaaatatttaaggccgagtgcggtggctcacatccataatcccagcactttgggaggctgaggcaggtgggtcaattgaggtcaggagtttgagaccaccctggccagcatggtgaaaccccatctctactaaaaatagaaaaattagcctggcatgatggtgcatgcctgtaatcccagctgctygggaggttgaggcaggataatcgcttgaacccaggaggtggaggttgcagtgagccaagatcacgccactgcatkccgacctgggtaacagagcaagactccatctaaaaaaaaaaacttaaggcatattaatgatttctggatctaatttggatcctgatccaatcaaactgcaataaagagaaagaattgaagttattgggtaaatttgaatattggatatttaaaataaaggaattgttaattttttaggtgtgatattggcatggtgatgtatattcctcctgtataaaaagcactaaccataaaagaaactgttggtaaattgagcaacattaaaattaagaacttatgtttattgaaccacagtattaagagtgaaaaggaaggccacaggcaatgagaagatatttataacaaatgtatctgatgcagggctaatttctagaatctataaataattacttcaaaataaatgtatataaaaagacaactcagtagaaaaatgggcactttgtttttttattttttttgagacaggttctcactctgttgcccggttggagtgcagtggctcaccaaagcctcaaactgctgggatcaagggatcctcctgcctttgcctccctratagctggaaatacaggcaaacaccaccatgtctggctaatttttgtatttttttgtagaaacagrgtctcactatgttgaccaggctggtcttgaactcctgggctcaagcattcctcctgcctcagcctcccacagtgctggtattattggtgtgagctaccatgcccagccaaaaatgggcacttcagatgatcaataaacatgaaaagatgcctagtatcattagccatctgagaggtgcaaaattaaaaccctcgataagatacaactgcacacccactagattggctaaaattaaaaagaatgaaaactttgacggttggcaagtatatggagcaagaggacctttcatagactgcttgagggagtatagattggcacaatcattctggaaaactgcttgacaatatttactaaagctaaatatacacagactttgtgaccaagcagttccactcttaggtgattgcccagtagaaatctgtacatgtattcactgaaagtcaagttccagaacattcaaagcagtgttctttgtagtagccccaaacttcaaacaatccaaattgtgaataatgctgctaggaacatgagtgtacaaatatctgtttgagtctctgctttcagttctttttctttttcttcttcttcttcttctttttttttttttttttgagacagagtcttgctctgtcatccaggctggagtgctgtgaataatgctgctaggaacatgagtgtacaaatatctgtttgagtctctgctttcagttctttttctttttcttcttcttctttttttttttttttgagacagagtcttgctctgtcatccaggctggagtgcagtggcatgatcttggcttactacaacctctgcctcctgggttcaagcgatttttgtgccttagcctcccgagtagctgggacttcaggactgtgccaccatgctctgctaatttttgtattttttgtagagacagggttttcccatgttggccaggctggtcttgaactgctggcctcaagtgatccgcccaccttgacttctcaaactgctgggatcataggcatgagccaccacgcccccgcctgctttcagttcttttgggtatatacccagaagaactggattgctggatcatatggtaattctgtttaatttttggggaactgccacacttgggtattcttgtattttagaaacttcttggttttaatttcttctgtagatataatctacataaacaactattgggatcctcagtaattcaagaactactttaatgaactgtattatcaaggagagggttgaagcagccattgtcagtgagtgtagaaagtgataacgtgggtgagttgggtgacatactcttttgctctcaagtgacccagtttgggtgatatattatatggcccccctagtaatggagttcatattaggcagatggtcacacttggtaatgaggtcgccttagtgttggtgttcctgtggagctccctgaactcgcaaactttaatcttcctatgatggccaaccttggtggaccaaggtttagaatgaaagaaattgctttggagactacatatctcttttgagatttgacatacttaccaaaatgagtaatgattctgacgttcttccagtgttatttgaaattcaacatgaaacttttcctacatgtttctttgttaaaaatgttgagtaaattttgagacaaaatgtacatttttttcatataaacattgaaaccatcatgttgaggattacatgcattctgtgaagtttgtgtattaacaatccgtgtatgtcttcccaggaaaatgttaactgcagagggtttccaactgtgttggcttgatccggtcctttcccctctggcttgcagaacataacacttcctccctaagtgaggcagcatgaagccccatccagttactactattgtgagtggctcagagttcagcatcacagtttaatgcccagtagtctccttcttaggtctagtgactgtgcaccaaagggttatctgtcctccctttcccctccaactgcatttgtggaagaggaacaggatggagtagggcagaataaccaaaataagctttcctattctgacaaggaaagaatggggagacaagacacagtagtgtcttggctcacctctctcctgagtggaaattggactaagatctctgggcgcgtagatggagtcttttgcccggtagacctcattttagggcgaatgggtagaaaggaaagacccccccccccgcccccgccaccaaatccaagaattgggagagttccattctagcgctcaatattcatgctggaagcttaaattaacccagatggtctgtttggtttatttaaagataaamctagttttgagcctggaggaatagccacgttctctgcaggtgagtctgggaatagagcttgtaatttgcatagttgtttcagtgtacagaccttcaatttctgttacaatccctagttcttgctctcatccactatcccgtttgccagatattggtctggagcttctccagggtttcagagggcagacgctccttcttcctccagagccttcctgaagtacactcttggctgcattttctgttttgtttcatccatcttagctcttcagactattttgtcatccagaaatttgctgaaatctcacatccactggtgatgcctgtcccctgctgtttctaaggccatagtgtccttccttgctgtacttactgacattcatttcattgggatattggggcccaaagcatgggctttatctcctatcttctgcaggaagttccaagttgtgtgttttgctttttgtgkttttttttttttttttttgagacaaagtctcgctctgttgcccaggctagagttcagtggtgtaattatggcttactacagccttgacctcccacactcagtcaaccctcccatctcagcctatggaggatctggagccataggcatgcgccaccatgcccagctattttttaaatttttgtagagatggggtctcactatgttgcctaggctggtctcaaactcctgggctcaagtgatcctcccaccttggcctctcaaaatgttgggattacagacatgaaccactgcgcccatccaattttgagaaactgagctggcattacaacatagaagcaggcagttgcaacacttttgttgacattttttagttttgttttgtgtatgtgatgaaggataaaaatggttcctcttgattgatgacacttgtgaattctgggcttctgctcttggcattaagataggcaggtgctgacaatgaccctgggaattgcttgtgtttagtttgaggtgggtgatgaagcagaggagtcagggaaggaaaccgatgaaagagtcaggagagtttggggtgctaccaaagcctgaatgtttttgagagggaggaagaggtcagtgtcaagtgcaatgggagggtgttgagtagcgtaaggagacgtggtttatcccacccttgtgtgcttcccacggtggcccagatgacagatgaagatgctgtcatcttaggtaataggacctaagtttttttgagcagtaaacctttataaaatacatttgctattttctggatgttgctgttatttatgatttttttagcgtctattcttttatgaaataactaccactttgcgtttataacctgtttctttaaaccattacaacaaaatttcaggcttttataccaaaaaatagtccatgtctgtttaactgcaaatgaccaaaaactaaatataataaacaagctagaagtttatttttcctcacttaaaagaagtctggaggtcagaattctagcagcttcacagtgtgtaggattcaggttttgactctcttgcccttctaccttcctgagtgtgtggcttctatctctagtataggatggctgctagaattccagccatcacttcatacttcagtaaggaggaaggagagagaggtctgctcctttcctgtaaggatactttctgaaaaacgcatgatttctgctcacatgtcattggccagaactaatttgcatgttcttacctaactgcaagggaagctgggaaatgtccctcctgaggggtcatgtgcttggctaagcattgaggtttctattacagtggaagaaaaggagaatggatgttgggagacaactagcagtctctgagaactcttaaaggcctgaagatgcctgttaaaaatggacagatctaagatgcaatacagaggagatgctgggagattataaggatggagagtagatgagaccagttgtggttgctgggagtcttcattagtagtggtaagagctgattcaatgacagccaggcagaaagggaaggggaactgttttgtaggtttggggataggaaagaggggggtcaagtatagtcataagcagctgcctgcacatcagtagtggagcccaggagagcacaggccttgcaggtcctttggtgtgtggtacataaacgtgtggtaaatagagggattaatctgcagaaaactccctgcatctcagtagctctcaagtatgtccaggcccacttctttctttttatttttgtaggggctccctatgttgcccaggctggtctcgaactcctggcctcaggtgatctaccctcyataacctaccaaagtgctggaattacaggtgtgagccaccctgtctggccacatttttttttttcttttttctttctttttttgtttctttggtgacagagtcttgccatgttgcccaggttggtcttgaactccttgcctcagcctcctgagtggctgggactatagtggcacaccattgcacccggcagggcacacttttctaaaagtagaggaaaaaccagtctttcagctctgtgtccctcattgtctgatttgtgtcttttgatctctaagagcagtgattgtttttttttgttgttgttgctgttgttttttcttttgagacaaagtctcactctgtcggccaggctggagtgcagtggcatgatcttggctcactgcaacctctaagagcagtaattgttatctaacatgatcttgagctcttacaaaattgtgtggaaatgacctgttgaagagagctagtaatggggctgctttaacaagatgactttggattcaagttattgcagctgcacccccttcctgccattgcaacagaaatatctcctccttagatgctgcaaaatgacttgctggaggtggcacaggtaccagtgtggctgagattgaaacccaggtgtcctactgtctaaagggccttttgaggatgccatggttaggctcttatcagctttatgggggcacttctctctggggaaatgaatgggtcactaatgcagtttagtagacagtcttcaaaataagaggtctttggtgcaacaatatgaaaggataaggttaggaaataggtctaggccatctgttttgttacatgtggaaactgaggctcatggagactggtaggctggccagatgtctgattgcttctggccagtttttttccatgggcttaactctgacggcttaaaaaatgagtctttagtcccttcaactgtaggtttatggtgtcccataaatctgcttccagtgtgagggtggcatgtagatgccctgcaatccctcctcattgctgatcttttggcactttgagtagaatctccccctacaatgyggtttgcaccgtggttgggtcaatatctgtcccctcttgtgattttgggagcgtaaaagccgcctgagctttgttttctcacagggatgtcagccaaacacccagttttctcttgaacagttgctatttctatctcctgtctgttccacagaattctcggtacagagattttttttcagtatgtacgcagtggtctctctgttgaaaacataccactaaggagtaactgttttgaaaacttaccaaggactgtttcttcagaggtactagtctcttctagggactttttttttctttttcttttcttttttttcctggagacagggtcttgctgtggtcacccaagctggagtgcagtggcacgatcatggctcactatagccctgacctcctgggctcaagcgatcctatgaaatggtgccaatttccatttccatgagtactatttgagtatagtatactagttttctccaaacctggcccatcaacctgatgtgagaaaaattgtttctcgtggccgttttattttttatatcatggattattagtgaggttgaatatttaaatatacatgctatttgtatttggtaaatggcttttcttttttgctaattttcctattggcatgttcacatttttcttattgacttgtaaggtttttaaatagttgaagaagttggaccctttgttacatgctgcagatttttctcaatttgtcatttttartgttgttccatttgaagtattattttggctaaacctatgagtcttcctttgtttctgcttgtgatgacatgcttrgaagggccttagtcctcctctccttgcttcccccaccatataggtacttaatttatatgtttagtttatttttagaaatggggtctcactatgttgctcaggctggtctgaaactcctgggttcaagtgatcctcctacctcgacctcgcaaagtgctgggattacaggtgtgagccaccatgcacagccttctcctagtgttttttgttttttgtttttttgagacagaacgtcgctcttttgccgaggctggagtgaagtggcgtgatcttgactcactgcaacctccgccccccgggttcaagtgattctcctgccttagcctcctgagtagctgggattacaggtgcctgccaccacgcctggctaatttttatatttgtagtagagatggggtttctcatgttggtcaggctgttctcgaactcctgaccttagttgatccacccacttcggcctcccaaagtgctaggattacaggtgtgagccactgctcctggccctcctagtatttttatagtttgcttttgacattgaaatctttcatccatctggaatatcttttaatggggtgtgaagtagagatctaaaatgtggtattttcttaaaggatcttaaaaaacgatccatttttcaaagtgctgccactgtgataactgaggagggcttggggcagggtgtggctttgtgttggctggctgctcagcagggctgaccatgcaatgaccagttgtctgcctgtgtccatttctagaaacaggctcactggattatcagaagcattggcccttgttttaccgggatgagcaaacagacctgcaattcagtaacttgacatgttggagtttgaacccaggtgtgctgaatctcagttccatgttctttgcgttacgattctgccttcctagcttcctggtctccgccagtcatttttctcccacgggttggccaaagagcccctaacacagggaagacttgcaagtttctcagggtcagccagcagggccatgaggagtggggcagcccttgccttactttgtacccagtctcggagagaaggggaggtgacaggggccastgggttccatggggcctgcaggccgaaagcaagggcaccctggagcagtgcaggcctgtgtggcacagtgccctcatcccgaggcccaactcagccccagccccagcctctgctgtggagcattcctgacgctcccaccccatttcctcatctctgtctcctctctaggcttctttggaaattgactgtccaaaccctcattaggtgctgtctcctcagcagatggtctctggagtcaggttctttgtcttcgatttctgtagctcccacgtgattcagtaaaggcatgctgattcatcatagggttcctggcagaagggcaaaactatcaggggaacaaagtagccagagatcacatgcggagccaccttctgacttggtcaagaactccttgctggtcagacctggctgttcctagcacgtatggttgtcaggaggttgagttggtactaaatcagctgtgaagattagcaactgcctgggcagtgagaaccaggcctctggtttcgggaggaatttgttgtgcagcaaaataaaatattgccatgttagtgtttatttttagtgttgaaatgccaccttaagttgacagtgttaatgctacattgacatatgatatacttagtatcagtcccaatatttcattaaaaagtacttagaatttataaaactgaaaaagtaaaactgatgcaagtgtaccaagtttggacacattagagaatatcaagtaaaaatcaaatttgatacaaattaaacgcacaacataaattaccattcctgtgtargttagtagataaaaattaatgtttactaagatgtactaaattacatttacttcatttactacatttaattcaaagttaaaactaagatttaaaatgcagtgatcagtgggcaaggtggtatgtacctgtagtctcagctacttgggaggctgaagtgggaggattgcttaagcccaagagttcgagtccagcttggtaagatagcaggatcccatctcttaaaaaaaaaataaataaaatttttgtagaggtggggtcttgctgtgttgctcaggttggtctcgaactcctgcctcaagcagtccttctgtytgcacctcccaaagtgctgggattttaggcatgagccaccatgcctggcctagactccatgtctttttttttttttttttttttttttttttttgagacggagtttcgctcttgttgctcaggctggagtgcaatggtgtgatcttggctcgccacaacctctgcctcccaggttcaagcaattctcctgcctcagccttctgagtagctgggattacaggtatgtgccaccatgccccgctaattttgtatttttaatagagacagggtttctccatgttggtcaggccagtcttgaactcccgacctcagaagatccgcctgcctcagcctcccaaagtgctgggattataggcgtgagccactgcgcctggtctgactccatggctttttaaaaaaaaaaaaaacaaaaaaacaaaaacaggcaatgatcttttaaaatacgcatcgttggtgacattgatacaagtatatttttgttcaagtttttttttctttttttcctggtgctgataaactaactaggagtaggggagtgatgagagcactgaactgcaactcattcctcttaagctttcatctctaaagaatcccacccttttgtttgataactttaaggatttctttttttggccaagattgcagccttttaattgctagtgtcctatggtttttgtttcaaagacagcatttcctgtttatcttggtgtactttcgtttcatctttagtttggatactctttgaactggcataagaattagtctccaggcaggccaggtacggtggctcacgcctgtaattccagcactttgtggggccaaggcgagtggatcacttgagatcaggagttcgagaccagcctggccaacatggtgaaaccctgtctctactaaaaatacaaaaaattagccaggcatggtggcacacacctgtaatcccagctactcgggaggctgaggcaggagaattgcatgaactcgggaggcggaggttgcagtgagccaagattgcgccattgcactccagcccgggtgacaaagtgagactctgtctctcacacacacgcacacacacatgaattagtctctaggcagaaactttgctttattgattggttttcttcctcctcttgaggattatggaggaaaagaggaagccttttaaatgaggacagcttggtgtgggtaagtctcaaaatataagtggagtaactggaaaagcatgccatttagtatgcatttgtaccacacgggcattgttgctttgtgttttaggttctcatctgtaaaaggtcagcaatactatatctcctgtccctcctgttttgtcccacaataatagccggcttttgtgtagtttagtttacaatattttgtctggattgtcttggggcctttggggctagttttgaactttgatccacaggagtaaatacaacttacagtgtgtcccaataccaccttgcatgcacagatcacttggaaacaaaagtttcaggaagcagtacttactgtttgtgatatattcggaagttttcttttctgtttgagtctatcttatactttttatgtacactttttattaaagtataacatatgtatagagtgcgtacatatcatatttttacaatgacttttcataaagtaagcacatctctgcaatcaagataaagcaaaatggcaccagtcccagggaagcgtctctcctgatgtctcctaatcactgctcccctcaggggagccactagcctgacttctggctccatatcttattttatattttgctagttgtgacccactgaattgatttcaagacccggtaggtctcaacctatagtttaaacaacacaaccttgttttattttcccaataactcttaggaattcctttttatggatgaaaaagctaaggcccagtggtcagatttctcccaagatcgtatagcttgtactgtttgctttttcccatgcatttgagctactcttcttcctgagatgaggaatgacttgctttggaaagacagttgcagccctttttgttttatgtcttgtttatcactctcccttaatgtgtttacaagattgatattcattattaatgtagctttagtgagttcctgatcttaccattcttaagtactgagaatgtttttggtttgtgtttttgtgactgagtcagagacatttgcttttgctttggaggtttgtggcttggaaactttcatgatatttgtctttggcctccccctaataggatgaagctcttcaggtggcatgcaggtatgacaaatgatgactgtgcacagcttcccaccttcattcactgtgctgacctgcagttccttccttgcctgtaggcttttcctatagagagatttctttccaccccgttcccacctcatgtctcccttaggctccagaatacctatgtggagggcctgagtgctaagctgtcctgtcatctgcaagcttgtctgattgtgagattgttgttcccagccagcacctctgggagtagaagtcccatagcccatacctggaaactttttccccagttgccgagcctggaggctctcttgggctgtgaagtgttcactggctgtggtagttcacagccgaggctttcattctaagagccttgaccttctgggttcaccacccttggtagttctctgcctctctgggagagaggcagcttggaaacactgtcagggcaagtgtgtcccaggctgtgttgtaggccatggggatatagcagtgaataaacaaagtctcttccactctgagcattcgtccaaatggaggagatagacaaatgtgcagtcatttcaggtggtagtgatgttagaagaataaaactggtttttcttaataggatgtagccttttgaagtgccagtgtctgaaggagcattccagtgtgctgtccagttggcacaaaggacagatgtctttttgtttgtttgtttgtttgttttatgagacaaggtcttagtctgtcacccaggtgggactgcagtagtgtgatcttggctcactgcagcttccacctcccgggctcaagagatcctcccacctcaacctcccgagtagctgggactacgggtgcgtgccactacactcatttaatttttgcatttttagtagagatgtggtttcaccatgttgcccaggctggtctcaaacttctgagctcaagcgatccgcctgccttggcctcccaaagtgctgggattacaggcatgagccgttgcgctcagctgatttgttccgattctgcttagagcatttcctgttattcaagggaaacaaatggaaacatctatagacctatatgttccatagggcaagattgaaccgcttaggactctaaaagtttttactctgcctacttagtcattatccctggcagcacctttgctgctgtgggaaatgcaactcatttattaccaccctccattttatggtggttccttggaggcactcccccaccccaagtcattttaacctttgggaagggctgaaatgctgtgcttttagtcattagttgcatttatgtaactgtagctctaaggttgtctttcccgcacaaatgccggcaaagccagtattgcaggccttgtagataaaggttgacggatttcattctttttaaaaaattactccttgagcttttaacaggttcaaggcaaggagctctcaaggtaaacaaagatgaataaggcagtccctactttttataatctcaaagtctaaaattatggaaggtgccctcttactgtaaatataactcataaaaaatcatatgggggctttagggaggatgtagctgtctcccttctggcttctgttggcattccttggctgtagccatgtcgatctctgctctgtcttcacattgctctctcctctgtgtctaatctcctgcctctctcgtagggatatacatgattatatttagggcccacatggatactccaggataaatcccttctctcttagcttagtcatatcttttgccatgtaaggtaatactcttcttgccatgtaagataatattcacagtttccagggattaggaagtgaattaattttgttggggggagttttctgcctacccatagacagcaatcacaggaggtttttcttagtggcttctagggatgtgaacagggaggagaaaagactgagagtaaagggggagatgagggaagggtgagatgtaatcaggaacagagagcagcagttttgcttggctggagcaggtggtgtgagggatggactaggatggattgtggaggacctcgaatgggaacagtttgtctaattcattaggcaaaaatgaatgggggagggatgtaatcagagctgtgctttttgaagattaatatggtagtgtatggagaataaatgagagaagggaggaatttgtggagatgccaattaggaggccagcttagtagtgaagggttgatctgcaggcttcagcaagggtgctagctgtgagaatgggaaagaccctaaatgaaagggtctgcatagtgtgagaactgaggaggtgtgtagggtaggggatttggcaacagtgatgcggacagtgttttccatggggcacatttcagggagattagggtcttgaaggaaagcagaaggatgaactagtgtgggtgggaaagatggtggttgtttttgaacccactgagttggaggtatcttgttggcaggttgaaagtttgcactggagcttggaggagaggacataactcgtgttatgggagctggtccacagaagagaggctgaatggcagggtcagctcactaaggggcagtgtggagatacagcctgggggagttactggcatttaggaagtgtgaggaggaagaactgagaagatgtcattggagaggattcagatgcgattaattgtaaatgcaggcagccagtcacattgactaaaaagaaaaaaaggaatccattggctcatgtaacttagaagactaaggtaattctagcttcaggcctggtttaatccaggggctcaaatgtcaccaagctttggtctccctccatctcttggctccccctcatgttggcttcatttttgggttttaaatggtagtagctagatgtagcaagatgttggccagcaggtgaaagtcccatgggaaaggtcatgccttcctcctggtggctccagaagcacaggaaattgctgttacgtgttcttgtcatctctgacctggtcactgtggtcaagggagcacagtgctctgatgaatcaggtctaaattatgtgcctacacttggagtagggggtgggaagagtactccaaagcaaaataaagggaccattactgcacagagtggaacaaagctaggtagtaagacactaaatgttcagggcaccagggatctgggtgggagggggaatggtggtacgcaaagcaaggattggttggatgctactgagatggctgtgaggatgctggagaacagtgtgtggggcttgacagtcagcagttaatctttcaggaaacggttttctgacacagtgtaggctgaagccagactcrggaagtttggggacatatggtaggtgcagactttgtaaaatagtttggaagtaaagagggggagaagtggattggtggctccaggccaaatggagttgaaagaaaaatggttttaggacaaacatctgaagagtggaaaaaaatctgagagaaaggatcatgatggtagaggcagagaaaggaggagttgattggcataggagagcactggaagatgcgggacctggggcctgggcagggaaagagaggccatgtctcagtctgtttgggctactataatgaaacaccatgagctcagtggcttataaacaacagaagtttatttctcattgttttggggtctgggaagtccaagattatggcgccagcagattgagtgtctggtaaggagctgctttctggttcatccagggcttctcactgagtccttatgtggtggaagaaggatttctctgggacctcttttataagggtgctaatcccattaatgaggggttcagcctcatgacctaatcaccttccagtagctccatcttctaataccattgagatgggggttaggatttcagcgtatgaattttggggagacataaatatgcagaccacmgtaggccaagacttcagattggggtaggtggcaggcacttatttcacttctttctgaaggagcttgttactgacagattatcattttaggtcctttagttcaagcttgtctgacccacgacccaacacaaattcgtaaactttcttaaaacattatgagttttttgttttttgtttgtttgcttgttttagcttatcagctatcgttagtgttagtgtattttatatgtggcccaagacagttattcttcttccagtgtgggccagggaagccaaaagattggctcctgctttaggtctttttttttttttttttttttaagacagagttttgctcttggttgcccaggctggagtgcaatggcacagtctcggctcactgcaacttctgcctctcgagatcaagtgattctcttgcctcagcctcttgagtagctgggattacaggcacctgccaccacgcccagctaatttttttgtatttttagtacagacggggtttcaccatgttgtccaggttgattttgagcacgtgacctcaagtgatctacctgccttggcctcccaaagtgctgggattacatgtaggtgtaagccactgggcctggcctaggtcatcattttttaaacaaccctgtaaaatctcaccaagatttttcacttgtttccagattataatggattctgtttgactctggtctccaggttgtcaaatgacatattttcaggatataagactataagtagacttttctattaacagtaaagcttgtgaatcttggtttgatatgtacaaacagagccaccactatgtaccccagtttctggttggagtgacagaatgagaacacagccaatttctgagcagctagcggtttggggacacagtaggaatttaatactgggtgatcgttgtatcttacaaggtgcatcctcaagtagtaataactcatttgtcagagatatatggtggtgttttgcagtgatttgcaaactgtgttctctgctgatacgttaggggttctccaaacaaaatttaaatctgacagtgaagatgaattgagactccttcacgctgttatctcagcacaggtgagggtgaggcacttgatgttaggaaaaccttgctttaacccatgtgtctttgcgatggaacagaaggataagcgagccgctttgaaaatcagattgaattttttttttgtagtaaagttttatcaaacatttaagacctttacaaacttgactaaattttgttattcatttcaaattaatatcagaaatctaatgtgttacattttcttttttttaatatatattttaaattatactttaagttctagggtacatgtgcacaacgtgcaggtttgttacatatgtatacatgtgccatgttggtgtgctgcacccattaactcgtcatttacattaggtatttctcctaatgctttccctccccctccccccaccccacaacaggccccagtgtgtgacataaattttatgtcagataatgtagaacagagaagcatcaaaaaatgactcaatggtcttgataaattcatttgaagatgaaattatgttaaaattttatagttcagtaatttaaaagtatattatagtttttttctttttgttttggatgatttgcatgtaaacaagtgtaaggaatctttgtaaagcatcagaagaaaattttaggtgttttgatgttcattaacagactattagcaagatgtcaaaggaataataatgcctgtgcagatggtaactgctttgttctgttcctcttttcccccaaaacagatttgtaaaaattgtatttgttacattattcacaaaccttttctacaaaatatataccaaaytgggttcttttgaaagatttttctagtaatttttaggtcatttccatatatattatgtgcagtttaaaaagcaaaccaaccctagtttgttaaataattaccctgtttttacttaaaaaaaatggggttgtgcacctgtgtaaagtttgtacatcttagcagtataaattactgacacatttttaaaaatgaagtaaaaactcagaatccttgtgattcagtgcccttatgtttttaaaaaagaggaaaaaataatgcaagattcagaatattggagtggttgatatgccttcttcattttagtttttgactggctgctcatatgccgatgatgatgaagctgagctgtttgtgccactgccatttgatgctgcgagaatcacaactgtttcatctgttgctgctgctattaaaaggcagagtagtaactggccactgaattaaatttaaaagaaaggcaggggagagccggcatctctgctgaggatggctttgcttaggtcttttcttagccctgcaactacttaacacttcatatgcttgctgaaggggtaggtctgcccttgactggttgaaccttgttcagaatcctgttcacctggctgttgaggactagaagttgtaggttgctgaggtggtgttgggggttctagccccctcctcacagtagtaggggaaccagagttttggggagccttagcagttttcttcctggttgcaggttggggtggatacagctgttagactgtctgcattgtccagtatagtagccactagccacatgtggccaattaaacyttttcttactgtggctaaatattatatatatcataaaattgataattttaaccattttcaagtgtatggttctatggcattgagtacgttaacattgttttgcaactgtcaccagaacaaacattccagaatattttcatcttccccaaatgaaactctgtacccattaaacaactctcccctctcactcccccagcccctgacaaccaccattctattttctgtctctacgaatttgactactctaggtacctcatgtaagtggaatcatatatttgtccttttgtgtgtggcttatttcacttagcacaatgtcctcaaggttcatccatgtggtagcatgtgtgagaatttccttcctttttaaggctgaataatatgccactgtatatgtatactacattttgttcattcctttgttgatagatacttggattgcttctacttttttgtttattgtgaataaggctgctatgaacatgggtgtacaaatatctctttgagtccctgccctcagttcttttgggtatatacccagaagtggaattgctgagtcatgtggtaattctatatttgattttttgakgaactgccaggctgtttactatagcagctgcattattttacattctgaccaacagtgcacaagggtttcagttttttcacatcttctccagtacttgttattttggtttttcttttttcttttttgaaaatagccactctagtggatgtgaagtgtgtggcagtttaaatttaattaaaaataaatacataaattcacttccttagtctcgctagccacattttaattgttcaataagccacacacagctgtggctctcatattggacagtatagagagaacatttccattattgcagaaagttctatactgacaaaacctggaggtagcagtggacctgaaagggattgatccaagcccagcagagtcccaaggattcaatcaattgataactgacacatacattgagaggcaatccattgataactgacacatactttgtgtaagtagtataatccagtatagacatagttttatattctgcctttttcatgttgctgcacggtgtttatagtagtcttgttaatagctgcacagaaagttgatttaccgtaatttacctaataatttttccttgttagggacataaaaccagtttctccttttcagtactgcagtagagtatgctcatttcccagttgtctccaggcctagcccttctggtttcttcatctgttcattttatcgtcttgctcttttttgtctccttactgttttaaccactctattggacgtacttggcctctaagtaaagtttgactaacgctaactagaaccagaccatgcctgtgttaatatagcctaaaatgccattagctatttttgctgtttgaactgcttgtaccatcttgggtcaagtgcctactccaaaacagtcaaggtgcacattgccttaggctggggtaaatgcctgttcgtgaacctatcactgtggcagaggggcagaattaaaaataagtagactgtacaagctgctgtataccatgaaatagtttatggatttttaggagggaaccaactgcagtgtccagtacctgggggaagatagggagataagaattaagggtcgaacatcccaaaatcaaaaatttgaaattttcaaaatctgaaactttttgagtgccaatgtgatgctcaaaggaaatgctcattggagcattttgaatttaggattttctgattagggatgctcagccagtaagtataatgcaaatattccaaattctgaaaagaactctgaaatgcaaaacacttccggtctcaagcattttggttaaggggtattcaatcgctacctctcaggtttctggcttatgcagggtatatagactcgcatgctgtcaactgattgactaggcaagacttcaggatcagtagttttacggacaatgtcaaaagtgttctgtttagatgtgttacttttgagatgcctgtaagaactttctcatggagatgtcagtaagtggttggaaatatgaatctgaagcttgggggagaagttggggttggagatacaaatgttggggtcattggcatggaattggtaattaaagccaaggggctggatgatgatacctagggagagagtgtggtaggtccagaactgagcccagggcccattcaacattttgaagtcaggtagacttcaaagtcacaggagactgagaaagagcagccagtcaggtagagtgagaacctgataagtatggtatggaggtagctgagaggagaatgtttcaaggaggaaatggtcaactagatctgacattgccaagatatatgataagatgaaggcaggrgaatctgtctgatttggcagcatggaggttgttttatttacttatgtttgaagatgcactttagtctccagagcctagggagatcatactgaggccacattgacttttctttgctggggtaatggatatttgaaagtaatttgatggccaggtactgtggctcatgcttattctcccagcactttgggaggccaaagcgtgaggatcacttgaggccagaagttcgagaccagcctgggcaatgtagagaggctctttccttttaattactggttttcaaaaaaagatttggtgtttcagcacccttcagaggtggccaaagtagttttttttgtttcgtttttatttttatttatttttttgagacagagttttgctcttgttgcccaggctgaagtgcaatggctccatctcagctcaccataacctccacctcccggattcaatcgattctcctgcctcagcctcctgagtatctgggagtacaggcatgggccaccactccctgctaattttgtgtttttagtagagacagggtttctccctgttggtcaggctggtctcgaactcccaacctcaggtgatccacccgcctcggcctcccaaagtgctaggattataggcgtgagccactgcgcctggccagtagtttcttacagttatcattatgaactcataaattttcatatacttgtgtttaaatcactttttgtttattattttaatgctcaaattgtcctatcgttggccattaggaatgtttcttcaaagactttctcattttcaatttaattttttccccaggtatccttagtgatttatcaaaaagagaaagaaactatttagcattgtggctttcataatttctttctttctttttttttttttttttgaagcagagtctagctctgtcgcccaggctggaaagcagtggtgcaaactcggctcactgcagcctctacctcccaggttcaagcagttctcttgcctcagcctcccaagtagctgggattacaggtgcccaccaccacgcctggataatttttgtgtttttagtagagacggagtttcaccatgtcggccaggctggtcttgaactcctgacctcaggtgattgcccaccttggcctcctgaagtgctgggattasaggcacgagccaccgcacccaccccataatttcttctataactaatatgacacatttgggattgagaacactgttaattccatgttcttcaagggagaaacatactagtttctcccttgaatagttacagtctatttgattggtacttgattccatgatggttggttataaaccaggaatactacaaaagtgacaatataatgttccaatatggtaaacagccccagggtgcttgtctgcccacaggagtaggggaggttggggcatgagacactggggacatttgctctcatgtctacttattttgtctaggaatctttgtagaaaacactattgtgaggtgagtgacagtgaagcaggtaccagatggcgatttatgatttaggggctcgtcgcatgtggagcccagcagctgtcctggttctacttcctgacagaggtctggggagcacacttgagcccagttttgagattgcgaatatatttttcttctccatcttactagatcttttggcagtattagacatactccctccttgggagagctttatcttaataaactgaaaaaaaaaaaaaattccttccttccccagtagsgctgaaaactcattttcccttaaatactaaatagagatgcccgactaaggaactgataatagaaggacccgttggactccagtggggcttctgatttttggtgtctttcccctaaccctggaagacaataggaaaacaagtgatgtcatcggaacagagccgttggcagagcctcctggggacctgagtggttttcttgtctctgatagtctctgttctgaattaagtaatggcttgtgatggaggttggtacttcctgcagctatttcatatttatagtcatatgcttgctgttagtaaacagatgcatctactccagaaggaggcttcaatgggcaaggtgggagagagtgttgggagaaaggattcctgrtcattccttgtcacaaaaattatgggtttaatgtatgagactggcagtcatgcagaggttgggactcagtacaactgtacgtatttgagttagaaagccttgcattcctagaagctggatttcagacaggatttcctcatcctttctgagacatacagattctgtactttttttggaaacccccgtattgcttaggatacatttggccacaaatgtctaagaagaaggggagataaacagtgggacagctggctgcagccctaaaatgcctcctctagtgctactgagtgcaaaaatgaattgtcagcctacgcgacatgtagcccagctacacctgccacttcagcaaaccctggattctctcagcatcattggctctggctgcctctgcagatgtggttctaggtgccaggccaggtgctgggggtacagtggtgaggaagtcaacatggctcccccacagagatgatggtctcgaggcggagactatgcggtgtgggaagccgtctttttttgtttttttgtttttttgagacagggtcttgctctgtcatctaggctggaatgcagtggcatgatcaggtctcactgcagcctcaatctcctaggcttaggcgatcctcccactttggcctcccaaagttttgggattacaggcatgaaccacggtggggagcactcctaaggaaggacaggggccgctgggacacacaggcagttggggaagatttggagagaaagggaactcttaaaagatcaakgaaaatttgctggaagagaagtgggttttagtagagggtggtttgcagactgtttaagtaggaacacaggagcaaaagtcctaaaggtaagaaagtacaacctgttctagaaactgactctagttcagaatggctgtaagagataaggctggatgagtagataagaccctgatctcaaggggcttgtaygccattttgaagacctgtcatctaggtactggggagctgtggaaggggttcaggatggagagtgacacaatcagaatttctgggaaggtcctcgtgttgcagtggcgagagcgtaggtgggagtggactctaggctgaaggtgaggtagccagttaggctgttgcagttactcaggagggatgatgttggcttgaattaagggaatgacaggtggcataaggagtggatgcaactgaaagctgttttggaggtagcatgaacaagcttggtgacagatctacaagctgagaaaggagccactaagggtgatggccaccttgttctcttgaaaattcggggaaagggtaccatttgctaagataagtcacatagtagaaggaagaggtttgtgggaagagatgatgagcttggttttggacacatggtgagttttaggtgtctgtggagacatctagtagttatttggatttagggtctgtagctcaagaagagacagcagggagcatgagaatgaatggggaaactcagggagagtgggaggcagcagaagaataagagagcttaggaccaaccccaaggaaccctcaaatgcggggacaggctgatgaagaggcagttcctaaggagaaggtcagctaaagatgcctggccagagaggcaggcatcaacccagggggaggtgctgcttggaagccagaggaagagtgtttttcaatagtagcattaaaagctgctgagggattgaacgaggtgaggactgagtccctgctgggtttcgtgacaaagtccttgttgacctgggagagctgcttcagtggaacaggtggggttgaagttgggttgttgtggtttgaggaatgatgcacagccagggaggggacatgaaatgtcgacagctcttcccagaggtttacccatgaagtggggaagaaagtgcattggttggatgagctgtcagaagttgtttgttgagcctgcctagatggttgtaagtagggctgtggtgagggagagagatgagaagatggagagggcaatggagtgagtctctaaggaggtgggaggagaaggcatggcaagcacatggctgactccgagtgtggctgtcctggggacagttgtcctttgccatcagtgttgtgtcctctaccaagtcccctgtggtcctttgtaaatagctttatctggagacagaatggctcacagccagttaggttttaagaagctgaatctgccacattcatgtattttcttgtcctttctctgagtgcagttaacctgttagagatgccggaagtgaagctgtccatctgggtagctgaatacattttctttgaatcccattattgctgtgaggcttttgaaggacagggtatggccatactggggatgactgtgaactcattcagagtggggtcctccttctgtttggtgttttgttctgacaattgaacttgtcaaatggagttagtattagggctaaaagtatttctttgttattcccaacaatatacacacacaaatggatgctgtcacacactggccagatatatgtatatatatgtatatatgtatattttttttcagtaggaactcagatgaaagcctacttggctttttcattgagagggccacctaagtccctgacacttattaaggatgcttattaaggataaacccatctctggtaatttctctcctaggatcctgtgtgagtggggagttgccctccctggcagctggtcacagggcttgatctagaagatggaggccatggtattcagcagaaaagttaggcttagactaatgactttcctccaggagaaagttgataatttgcatataaagcagtgcaaaaaattgtgtaggttatgaagttagtcagtgaaacttgtgaatttgaatgcagtgtcagtgggaaaggcagagttgttggaggcataacccaycagtgccttgaagtcygccttttaatgaaatttccttgaagaagaaagaaaaagagaagaaaagctgaatgatggtactgcttattttctttccctagtttttagttcctcttaggcaaatatgaacagaatattaatatgttttctttagtgtagtccagagctgagtcattatctggtaaagaaatagagtatggagctgggtacggtagctcacgcctgtawtcccagcactttgggaggccgaggcaggtggatcacctgaggtcaggagttcaagaccagcctggccaatgtggcaaaaccccatctctactaaaaatataaaaattatctgggcgtgttggcgggcacttgtaatcctagctacttgggaggctgaggcaggagaatcgcttgaacccgggaggtggaggctgcagtgagccaagattgtgccactgcactccagcctggatgacagagcaagactctgtccccccaaaaaaaaaaaaaaaagaaaagaaaaaaaaaaaagaaatggggtatagggtaggataggttccaccggtgtggagcctgacacagtgcccaagggattctctctagccatgggcacagccacacttttttgggtcaaacactgaccatcactactttgggtgtcagagtcttgagaaatatccaggtaggagggtgggcccctggcaccaagtgaagaccgaaagggagcctcagaaggatgctgtccaggaagcctcccaccaggctggcaggaaacccaaacagcagggttttcttcccagagagttgatagtgaaaatgagttccacaaatgctgttctggactgagctaggtccctccccaggaaaagccagaccttaaccacaaggaacatcccctcctgcccactgctccctctggccctccctcactgccttctcttgcttctgttatgttctgatctttgggtcagtgctgggtgtggggaagcttctgggcagttggtggagaagctttctgagcatgagtttctccaaaaatgctaatggctcttaactgagcccctggtacacaggacactccatgtgtccttcatcctaagtgcttctgcctttctctagagggtctgtgtaaaccaaaaggggtggrccctcagaggagcttcccccttcctttaaagcagcactcttgtttcctgtttataccagcaytacaacccccttgggaaatggctgaggaactgtgggaggcggtggttgagagagaacctgagagggtctgccccacctggcctctgttcccrgccctcgggattgaaagggaaggaaggaggaggggtgcctgggagctgggtggrtatgagtcagaagaggcagggcagcctctccctgctgtgctggtctcagtacccaccaggagtgaggcaggagtggatgctggtctggtcctgctgccagggctgctgcaggggcaccagtcaggcacaygagcaggaaagtgggtactatcatatctcagtgtagtctggacactttggtccatcataggtcaagtagaattaattagctcattagttcaacaaatcttggggcacctgctatgttccaggcactgctcagtgcagtggtgaacaggtaactcctggcctctgacacactgccgtgtctgacatgtatatggtgtttttaccatgttcccagtttacactcatgaacatatgcatatgtcttgataatgcccattacaaagcatacatgggaaagaaaagaagaatgaggtaagtagagatgagttctaagatttcctcccacactttggcagatggttcagcttcagagtctactagcatggactgttgctttaatgggtagcttttgtgtttcagacaccaccttacacagttttgagtcggggctaccagtgtgaaagagcttgaagcaaggtaggcaaatgctgtgcccagatcatttattagcacttggccccagcaaggcctgatgctctccttgggaagggtgcccagcttgtctggggtgggtgttttagggtctcgtgcttctgtcctgtgtgctgtggtcaggctactcaggggagtgcggcaggcacctgctgctattcagtactttatagttttcatagcctttcatcggggtcgcattggtcatcccaacaaccttccgagacagggattccttcgccgctgaagaccagaggatggaggcctgtgctgtgtgtcatgagtgtcagagctggccctgggccttgctttcctggactggccactgccttattctgcagaaagtttttcttgacatctccccacctcgctgtgcccagaggagcaaactgatgaatgtgttcagcatgtaccacctttcttgtgggaaggagcatgggttccaggtccctgcctgcttccagaccctctgtggaagctgccgctggcactcagcttccttttccggggtatgagcaactgtgtctccaagcagaatgcctttgtccacggggtggggaggagctggaagactgcaggcctccaggttctttctctcaggtttctgttccctttggcgtccacaggacatcaggagccaggtggctggctgacctgtccccctcctcctctgtgtcttccccaggctgtgcagtttccccgctcacagggatttgccgttggcacctgttcggccctgtctcagcatgtgggagagagtggtctgtaggttggtgttggtttcctgctcagaggatgcttcctcagtaggcccggctgaggcccagggaacctggagttactcacttaaaggtagcaaaaacctagaaagttaatctctttcaggcttgtttgttcagtggttttttgaaaagatcaacaaaattgatagactgctagcaaggctaataaagaagaaaagagagaagaatcaaatagacgcagtaaaaaatgacaaaggggatatcaccaccgatcccacagaaatacaaactaccatcagagagtactataaacacctctacgcaaataaactagaaaatctagaagaaatggataaattcctcgacacatacttcatttcttagttgttcagctcagtccgcctgaggtcttggtaacaatagttgcgatatctttgtaacagttctctatctccttttactactctctgcctctggatacccctcttcacttcaccccttcctacaaggaaggagtcaggtctgacagtgttgcaggatgcagtgctgggctaacggaaggtccagagaggctcttagcacggagctggagctgcctgctcctccctcgcaggacgctgcctgggttccgttcctgtccttccctgcctggggaactagcagcctttgtgagtctccttgacaacaggatggataagttaaaaataaccttgtgccgggctttctgtgtgtgagtgccctctcccctgctgctctggagcgcagtccctgcagcttctagaggctcctgaatgcatctgtgggagcctcagtggggtccaggtgctagcattttgaagccccgaggttttagaggtcaaagccaggtgatcaggcagcatcattaccttgtaactcgcaatgattaccgtaatattactggcaactggtggttgccgatggtgtgtgggtgtcaatgttgaaataaagattggacagctgttgtgaatgctttgtcttcatttagtctccctggagagggacgactctggagaccttactgtgtttcagaaactctggagtggtgtactgggacacagccctgggtgagagtttggttatgtcgcttcaaggaatccccatgggaaggagggtccttaccttatataaggtgaagacgccaaagtacagaggcacttgggtgacttatccagagccacctgtctcgactgtggcagagtagggagcagtctgtgtcttcagaagctgtggctctctcccttggatcctaatgatgaggccgtctttattgggcctttaccaaagccagctgtctcttttttatcagcagtctgcactaggcgaggccctctgtgttgctaatctgttttgtttttctgttttgctcatctgcactagttaaggccctctgtcttgtcacagttgtaaattaatttagaaagagctgtctccctgagggcaggggctgggtttttctttacacacctggacctaattcttctcttcttccatccattagtaagtgytttgctgtgtgccgtgcatggggataatgagaacaagaagttatgttcttgtctttaaggagtttgtcgtcagccaaggagacatttacaaaagtccccgttgtggtcagcgctgagagggagaaggttctagtgttaagagagcaaatcactggggtgtctaacctcgcctgaggtgaaggtgggggttagagcagtctgagagaacatattagtaacacaaagtactcaaatctggagcacataaaccactacaaatcaataaaaaaaggaaggcagaaaactccgtagaaaaactagccagtgatttgacagacacttgacagaagataccaagtggccagtgaacatgtgagacagtcacaattccgtgtattcatcagtcatcagggaagtcagaggacctgggttaatatgagacattgggccacgcattgaacttcccagatcccgtttcttatttgtaaatggggcttctcctgtcccttcccttcctcccagtactgctctgaagcttgcatgggaaaggctcttcagaccttgcagggctatacagatactaagtagtgttgttactctaagtgatttactttctcctccacctcttctcatagcaactattctgaattcccctatgaaagaaaatacttgagtggtaggatggttcctaggattcagaatagcctgtcccttgatactttgggtaaagagcttgctgctggcatggctctggttccctcacccaggctgggagcagggtgacttcctgtgggtcttttgtcacccagggcctggtggcagggaaaggactgaggtgcaccagtcctggctcgagcgttgtctggagtaggctgtctggttcgttgtccacactgactgtgattgacctcctcacagagtgctctagtgaagtccggaaataacactctggacttgggacatgttgacattaacrggtctacaggggcaacagcctcaccacctggcttcccctgagagagcctggtcagtgccattggctgccctagcaggctcagggataacctcctgttaaaaccggtcccagcctcccttttgcattctttggatacaaaggagccatgttctctctcttttggatctgccctctgcggttaagcagatggtacgcggtgcagatgcacacctctcttccagcagagtgtggctggccaccttggcacatgtcacaacagtgtcaggattgctgctagtcctgtcagtcccatcacctgactgtgccaggttcttaggccctgtttggagtctttccccacagatctctcatgacaggcatagacttctcaatggtctactcggcacttttgacctttttctcttctgtatttctgccacttaggagtcagagtcagaagcmaaggtagatggagagactgcatcggacagtgagagccgggcagaatccgcacccctgccagtctctgcagatgataccccggaggtcctcaatagggccctttccaacttgtcttcaaggtaacctggcttaatgatgcaggtgcttgttgggggctttgcaccatgtccaagtgccctggaagagcctgcagagagcccgtggtcttgcagagcaggcccgctgtcttgcctcagcctcccatgccactgctccaggctccattgagtgtaatctagtgcttagcagtggcagtgagcacagtgaccaggaggggagggcaaccaaggctggaaggatctggccccggaarggtgcttcagactggactaggaagtgcagttcaaagaggaagaggggacaggagggatggaggtgggtgaggtcagctgacactgcacagcacaggaaaccagccttgggtttgcgattaatgggcaggctgcttttcactgaggagtccacgtttccagttcagagtttagtttctctcacatcctttgtgaacagttccttaaattctccaggaagaactgggaaacatcttaacctaggtgaatctagtgttaaaacttttggcccttgagaacctggttcttttaacacagctatgtgagtagatcaaaaacacattataagaccccaaagcattatctcagtgttcctatgtgtgcctccarctgtccycttgggagtctgaattgtgcagtggttaagggcgtggactttgcagccagacccttggattcagatcccagctttactgtttgccagctgtttgacctgtgcctccatttcctcatctgtaaaagcgaagtgtgttgaggattgaaggagttaatatatgtaaagtcctcataaaattaccttactcaggccgggtatggtggctcacgcctgtaattccagcactttgggaggccgaggcgggtggatcaggaggtcaggagatcgagaccayggtgaaaccccgtctctactaaaaatacaaaaaaattagctgggtgtggtggcaggcgcctgtagtcccagctactcgggaggctgaggcargagaatggcatgaacctgggcggagcttgcagtgagctgagattgtgccactgcactccaacctgggctacagaggaaactctgtctcaaaaaaaaaaaaaaaattatgcatatttatggtagctgttattatcattgcataatgttactattattcccataattattcagggcagtgcagtgtaggatcctgctgctggaaaaaaatatttttttcttcagatagtcagctgtagaaaccatccaagtggatacagaagcagagggcactacatttcccttggtttttttgtttgtttgtgttttgcctgataccttctttaagatataagctaggtttattttttgccaagtttggttgtgacttaggcattggtactagtggtcctgctcctgccagcatgtggctggtgcctccgtcacggtgaatctggaaaggactgagctcagggccctcatctcaggaagatccatatcccttgagtttgtgcattggtttttttctgggctcctaactggtgttttctccttcccctgctctctgacctagatggaagaactggtgggtgagaggcatcctgactttggccatgattgcatttttcttcatcatcatttacctgggaccaatggttttgatgataatcgtaagtgccatttcacactattttagttttcccttcagtttttgctgcaggcccggttgtcttaagtgcgaggtgttgggttggttgtgggaattgacgggggtccaggcttctcagaaaacctctgccatagaacatctgtgacttcccacttctcagtagccacctggagggtcattggtgtaggctggttgtttatggttgaagatgtctcagtgtcttttcttttaaaaaactgactttattgcctgtgatcccagcactttgtgaggctgaggtgggcggatcacgaggtcaggagtttgagaccagcctgaccaacatggtgaaacccygtctctactaaaaatacaaaaattagccacgcgtggtggcacgcgcctgtaatcccagctactcagggggctgaggcaggagaatcccttgaacctgggaggcagaggttgcagtgagccgagatcatgccactgcactccagcctgggtgacagagtgagactccatctcaaaacaaacaaacaaacaaacaaaactgactttattattccaactctgtaaacttttaccctgggcatgtctctatatgactcctggtttcgtttcctgttttcctggggcctcccttctgggcttagagcttttgttaaggaaatcccagtccacagagctgctctgtctgtcttcccactgtcctggacagggtcaggtgaccatcagctgcatgtgagcaaagcatttgactttgaatacttgagacttttcaagtattcagagtcaaaaggagaatggattggttgaatcctgggaggttctagaataaaaagttaaaaaggaggttttagaataaagttaattgagggtcaggcatggcggctcacgcctataatcccagcactttgagaggccaaggcgggaggatcacttgagcccaggagttcgagaccagcctgggaaagaaggtgaaacctcgtctctacttaaaaaaaaaatccttttggctgggtgcggtggctcacgcctgtaatcctagcacttttggaggctgaggcaggtggattgcttgagcccaggagttcaagaccagcctgggcaacacggtgaaaccctgtcttaaaaaaaaaaaagttaattgaaacatcagggtgtgtattttattgtgagtggaaaattggatctactccctgtgacatagagggctgcattgctctgtgggatggtatgagagaggaagaaggagggaagcagaaccactggaggcccgatatttttcttaagtataatgggttttctggaaggctcatgacctgttggtttccatttccaaaaatcataagaattggggtgtcagtgaatgttttgtgtcccgcaggtgatgtgcgttcagattaagtgtttccatgagataatcactattggctacaacgtctaccactcatatgatctgccctggttcaggacgctcagctggtaagctctccggccccacagaggcttttagaatttggatgatgtgctttgtggcaggtacttacagtgacggtgggtatttctatcacttgctatagagataaatgctggagaggcagttatcatgttaggtcatacaaagtttcatgaagaaaatggtatttgagcaataagtgaagaaatgggtaagagaatgttaggagaatgttaagagaaagttaagagaaaaaggcaggagaaaagaggtgattgccacagactcgcacagtgcctttgagacctgagtatttcataggccagactgtgtggttggccttgcaggagtcttatagttacttgaagtctggaatcttcctgagaagaaaccagatgggctgcattctgtgactgtgtttgcctcgctatttggattccttaaactctgcatgatgatcccgtttttctagatcagtatatttttcatgccgtcatatctcagcatcccactagagttgtctggaagttgttaggttctgctgccggctttgcttgttatccttggaacttggtttccttatctctaagacagatggttgagacttactggtttccagactgtggtgtttgagccctacttcatcagaggtgttttgagtgccagagtgggcaggagtgaggctgaatgcatgggatctgggctccgctgggaaagttggctttctccgtttcctgggaaaggattcagctttcttaaagcaaaaagaaaaacctgtaacacatgtctgagacccctttctgatctgaaactctgctttattggccgtagtattctcaggtggtgacttttgagcagagcactgcaccatgctgagaggacctggggcaaatgtggaccttctcaccccactgtgcagggatacaggggttgaagccatgacttagccggctggagagcagtggtttttgccccagcaacctggtcactgtcaaggaagccgatgtgctcagatgtaggctgggcacccccttcctgaggtgtttcctgtcacccaacagacaggctgcctcccagcctccagatggaattgggattgccacctggcttaagatgcaggtcccttttgtggctgttctttagctggaaagcagtgttttgcattttgttaacatactcaggaggcctgactcctggctgtggtcactttacaaagaaagttttttccatgtaacagaaaagaaacccaatatgggagtttttgtacttcataatttaaaaaaaagaatgggaaagaaaagctctccactttcttctctatctcaggatccttgctgggggtttgcagtgatggctgcatggtsccatactcagcagtactgtggaggctgcaagggatggcttctcttctcatgaacgccagttgaggagagagaatacacaagtgaagagttaacgctaatggaaggtctgtttgtcagagccaggcttcagagaggcagatgcatcattaattgcttagtcagataatcacatattacttgctatagaaataaatgcaggggaggcagatgtcatgttaggtcatgcaaagttttatgaataaaatggcatttgagcaaggagtgaagaaatggagaagcaaagagaatgtcaggagcaggaaaaaggcaggagaayagcagacaggtgtggcaaagccggaagaaaccattttgataggagtgaaggagttcctgttgggaagagtggaaacgagactggggaagcaggatgaggcgtgtttttgaaggtcatatggttcaaggatccctcagttaggtatgggaatgctacaaaaggggcaaaaacggagtctcaagtttgggagaaatggagagtgaatgaaagctgctgtctgtttctagataaatttctcacctacggtgtcaccagagagcaggaaaccatggtctgcctgttgctctgtgagctgtccygggggactyaagggtggggggtattctgctgccctctgtcccttcctctgggatgtctgactgccttgctgtgaaggcaagggtgctccccacggcaatgacctgtcttcatttacaggtactttctcctgtgtgtaaactatttcttctatggtgagacagtgacggattacttcttcaccctggtccagagagaagagcctttgcggattctcagtaaataccaccggttcatttcctttactctctatctaataggtatgcattaagcagttcaccatttcttgtgtctgtattgtttttgtatgtctgtcaggtaggaattggggaatttcttggttagtatacagttttgtgacattaactgtgaccatgcaggggagcagagctgatgstctatgttaagctgtagcagctgttaccttttttttttttttttttgagccagggtctcactctgtcacccaggccagagtgcagtggcaccatctcggctgactgcaacctccacctcccaagttgaagcgatcctcccacctcaggtcccgaagtagctgggactacaggtgcctgctaccatgcccagctaatttttgtatttttagtagagaccgagtttcgccatgttggccaggctggttccgaactcccgagtttaacttatccgcctgccttggcctcccaaagtgctgggattacaggtgtgagccaccaygcccggccttgtaggagctcttttaagagaagcagagtgtaggggcaggactgtggcctgtgccacctgcccctgtgtttcagccaccattgaggaacagcacagcatggtcctgtcctgactctcctgttggcaaagattctgcagtgggaccgaaacaaaaatcatctaggaacttaccatctttaggggagtcattttaggagaccgccttgggtgacattgtagcatggtggaaattttactggatttgggcgtagactctgcaacctcagggggagctaggaacataatatttctgagtctcagctcttttgtaatctagagctaaaactgcagggttactgtgaggattaaatcaaatacattaaaacttcacaaacattaaagcgttatattagtatacattcaggtaaggccacgtactaattctaataatgctgatggtttttcatagctaccttcaaagctagtttgaggtgcacgaaaaatttgttctgacctcaatgtcaatctgacctatttttgatcagcttgatagcaatacttctgtgaatgacacctgactattaaaatataaaatctgcaaaggggtctgctgccattgaggatattcagagagtatgctgcagaccccgaaagcagccttccacagtgggaggtaaggggtctggaaaagcgacatgcttatttctgggcagaactgcttttgaggatctccgcatgtttatggataaaggttcctttccttcctggagaaggggtctgcrgacatgttgtgctaccatctaggtcactgtgagagagataaaaaggtggtcttgaccctataccatgtggatccctcttctcccagccctatgaatactaggacaggtattggcaaactttttttttttttttaaggggaagcaagtttattaagaaagtaaaggaataaaagaatggcccttagagcagccccgagggctgctggttgcccatttttatggttatttcttgattatatgctaaacaaagggtggattattcatgtttcctttttttagatcatatagggtaatttcctgatgttgccatggcatttgtaaactgccatgtcactgattggagtgtagcaattaggacaagcagaggtcattctcattgctatcttgattttggaggggtttggccagcttctttactgcagttgttttctcagcaaggtctttatgacctgtatcttgtgtgacctcctatctcatcctgtgacttagaatacctaaccgtctgggaatgcagaccctgtagatctcagcctcattttacccagctcctattcaggatggagttgctctagctcaaatgcctctgacatttcccccatcacttttataagagaacccttaatcctaagggttgcagagggacgaagatccatcctctgtaacttcttcaggctgattaggggcaatgatattcctgcctacctatcgaggtctcttgtattcagggtagagaggagctcagtcagaaagtgtcagtatggttagggctattcacagctcggacacaaagtgatatctggaagattttgtaagtgtttaagagaacattgagtaagcttatcctgcattcctacacaaatagtacaactattccatatcagtaaagcaaaataagcaaaactatcccaagtaaactaaagaaggctttccatgaactgggtaattgttggaaccaagctgatacggggtcggtagctgattgcaatatgttcccagaattagaatactgattcagatttttacatcaccaatccctcttgtttcttctgagctgcagccagagatcactggttggttcacaggaacaagcagtctaaattgcagaaaaaaaccaaagtcagccaatcagtgctgcagtctatttcctttgggttgggggtctcctcagtattgtccctttggggttcaccagaaagatgttaccagaaaggggtccagacccggaccccaagagagtgttattggatctcatacaagaaggagtttggggcgagtctgtggaggaaagtgaaagcaagtctattaagaaagtaaaggaataaaagaattgctactctgtaggcacaacaggcagcaaactttttattaaagttccaaacagtaaatattttaggctttggggaccatagggtctcttgcagttacagtcatgcatcgtttaaccatgggctatgttctcggaaatgcattgttgtcattttgtcattgtgcaaacattgtagagtgtacttatgcagacctagatggtatagcctcctacacacctaggctataatgtgtagtctatttctcttagagtacaaacctgtacagcatgttaccttactaaataaatactgtaggcaattataacacaatggtaagtatttgtgtatctaaacatagaaaaggtactatatggtaattagtaaatcttatggtattataatctatgggtattataaccttagggaactgttgttgtgtatgtggtgtgttgttgacgagaacctcgttgttcagagcatgactgtactcagttctgctgagttgtagcttgaaagcagccatagacaatatgtaaacaaatggacataactgtgtttgaataaaactttatttataaaaacaagcagctggcctgaccactgtttgctggcccatgttctaggaataaaacattcctatctgatgaaccatgttctaagtttagtgtggtctgcatgattataaaatattgccttccttttactgtttgggaggagttattttttccttgtgactgtttatctgggtaatgtttttctcccctgggctttgacattgtgcactggttagctgctgggaataaattagccaaagaaccacttaacatagctaaaggagggcaaagataaatgcagaacataattcatttttcttttctcctcccacctcaaactaggattctgcatgtttgtrctgagtctggtcaagaagcattatcgactgcagttctacatggtaaaggaaatgcatgcgtgtgtgtcagaattcttgatttaaatgaagtttttcaggaactcaacaagcctttcatgctttctgtgacaaatsaaaactcaggaacatggtctgatatgtatgcatctagagcatgaaggaagaatgcccatttaggtttaatggctctacrttgacttagacccagtcactgttacttacaccttaagcagcctctccactaggaccctgaggtgggctccagagaaggcacaagctgaagcttcagacactgcccacagatgtcctgtctggtacatcacttgctaccacttattccctgactcactagagaacagctcctctctgagtgctccaggtgctcaataactactaagaaaatgaaaaatacccaggctttcagagcatgggagagctcactcactagtgggctgtgggggacaaagtattactctcagaagcctgatcttacctgttcactttcaataagtcagatacaaaagcagatatttttcctacctgcttctcagcagttttctatttggtattgattgttctttgaagttactttcaaggtaaactggtaagtagtgtttatttttcttttttttgcagtttggctggacccatgtgacattgctgattgttgtaacacagtcacatcttgttatccacaacctatttgaaggaatgatctggtgagaattgggagttggattttcccttttattttgtgrgtgtttctcgtgtacagatacccccctctaagccagtggccctcaccttgagccacatcagaatcctctgcagggttcattatagcacagattgctggaccccacccctgactttttgattcattagatctggggtaggcttgagaatttgaatttctagtacattcctgggtggtgcttatattgctggacaggacctatgctctgagaaccactgttctagactaataggtacaggaatatttaaagactcaaagacaatgcaacatgtatggcaacagatttgaaaacctagaggaaatattcatgatttcctgrcaaaatatatactaaaagtcatgaagaagaaaacgtgaatagatcagtaactgtaaatgagctttgaaaattatgtaagattccatatctggaaagagaaacaggaccaaatgggttaacagctgagttttatctaacctttataccaaagccaatgaggagagagaagcaggaatgataaacccatttctgctacgattatagataaatcattctaaataaaatactagcaaatagaatctggcagtgtgtcaagggaataatatgcaaataccgagtggattttattccaaaaatgcagtggtttcatgtatcagcattgatagaaatcactggccaactgaagcagctaggtgatcttagtgaaaaggttaaagggcgggcgcggtggctcacgcctgtaacccaacacttttggaggccaaggtaggcggatcacgaggtcaggagttgaagaccggcctgggcaacatagtgaaatccccgtctctactaaaaatacaaaaaaatagctggtgtggtggcgtggcaggtgcctgtaatcctagctattccggaggctgaggcaggagaatcacttaacctgggggtggaggttgcagtgagccgagattgtgtcactgcactccagcctgggcaacagagactctgtctcaaaaacaaaaacagaaacaaacaaacaaacctgtaatcaaagaactttttaaaaagtgtcagtgtcagggagtggagggtgaggagagagagaacaagtgtggaaaccacctctttcatagtgaggatgactggatcagcaggggagtgggcagaggggaaatctagctgtgcgtgttggggtttcacactcaaatacagtcctggggaaagatagggccaactagagctagtaataaacagcaagaaaagtcagtaaataatgaaagagtcattaaagcatactatttagaattggggaggtaaccactagaaaaataaaaattagaaacgattagaagtggttatttttgggaatggagatagggatgggagaaagaaggaaaactttttgttccttttacaattaaatttctctcattgtttacgtatatttctttatcatgaaaaaaggacagatgaccttttagtttgcaacctccacttattcagtagtcattcagtaaacacttgaatatgtactctgtgctaggtactaggtatgacttttttggtattttttatgtttttaacttactccttaatgggttaccagaattttatgggtgattttggtgctggaatttaagaatggcactattttgtgtacttttgaggtactgtcaccttgcttgagttgatccttactttggttcatttctaggttcattgtccccatatcttgtgtgatctgtaatgacatcatggcctatatgtttggctttttctttggtcggaccccactcatcaaggtaaatggattaccctaatgtgaaataccactgtgaggggagggtggtgctctcaatgtgagtagatcagcctggcagacagaagaaatctagctgtgttgtattgtggccatgtcttcatgtcttcctggagaaaggccaaaggaaaacactgacaactgattaaaaaaaaaaaaagataataaagaaaataggctgggcgtggtgggtcatgcctgtaatcctagcactatgggatgctgaggcaggaggattgcttgaggccaggtgttcaaaagcagcctggggaacttagtgaggccttgcctttactaaaacatttaaaaattagccaggcatggtggtagcatgcacctgtagtcccagctccttgggaggctgagatgggaggmtctcttgagcccaggaggttgaggcttcaaggagctgtgatagtgccactatactccagcctgggtgatggggcaagatcgtgtcttgaaaaaagaaaggaaaatatttttacagatttatataatcttttttggggacacattttttgggactttgatctggatttgagtgtagtcacttaattagtatatcgttttctaatataaaactattcgaatgactgattgaaacagaaagggaaccaaagggaggaggatataagatagggaacaaggaaaccatatttgggggagctttaaaaggtgacatggttaagagaatggggttttatgaaagaaaggttcttaacaagtaatcattgttcgcaaagctatagttatcaaaacaccctttgctgagaacttgctctctgtccacagctgtccccgaagaaracctgggaaggcttcattgggggcttctttgctactgtggtgtttggccttctggtaggtggtggctttcagctgtgtaagggattgggtggacagaggcctcataccaccttccaaggcctgtccagasctggagagtgtctttggaggccaggactgtcctgctgaatggcaaccttgccctgaagagggccactggccatgccagccatccaccagctttcaggcagggtgctagcagttggagagcaccttctatgccctctcgcgcccaggcatggtgacatcagcaggtagccttcttgtcaggcatttgatgttccaaggtcagggtgagtgcacccaagggaagatgagatacacagcttttctcctatgtgtgccttgcccagaggtgggtgattttcctgccctttccagagcaccattctctgcttctgacccttgggccagtcctccttcttcagcactgtctggctgcccttcagtgctcaccgcccagctttgttgctttccagccttgttcctcctgagatctgcctctcactgtgccccttccccatggcctctctccagttatcactgacttcagagatcttgaggaaagtggtcctagctccccaaatggggagagtcttcttgtagttctttgccccagtcccttcaggttttcccggattctttcggggcctgggtgtttgggttcctgtatgtaaccttggtgggtcatgagcctctttttttttttttaattgaggtaaaatatgtatggtaaaacatgaacctctgagcacatagctcgcagttagcagggtactaggcaccctcaggaacatggccaaaccaggtgcctgtgtctgggctggatggttggaacttacttccttgccggtctctctgttattcctcctcagctgtcctatgtgatgtccgggtacagatgctttgtctgccctgtggagtacaacaatgacaccaacagcttcactgtggactgtgagccctcggacctgtttcgcctgcaggagtacaacattcctggggtgatccagtcagtcattggctgggtatgtgccactcacagggggtgagcggcctccatggacagtggctacaaagagagatccycctccatcacctgccctctgaaaaaagctagcttcctccttcccaaagctgtaagccccaggatgaaggagaattgctcacgccaggtcagggtatgggcaggacagctttcccccaacatcagattgtttagaccagtggttttcaaagtgtgttctgtggatccctggagggccctgggatccttttagttgcgggggtagggtgggggggtctgtgaggtcacaactgtttcataattagactatgacattattttcctttttcaatgtgttgacatttgctgtgatacggcgcaaaagcagcagtggttaaaactgcgttaaggcagtgggttcctcatgccacacactcacagtacaaacaggccagttctaatgaatgtctatgaaatagtaaagttactaattttgttaaatcttgacctttgtacacacacctttttaacactctctactgaaatggaaagtatgtgtaaaacatttctgctaagtactgtagtacagtgcttgcctaaagggaaagcatgtgtgcagttgtttgagttgtgagctaaattagctgctttttttttagaaaagaaagtaaattttacttggaaagaaccaacaaattataatttttcagacttgggtatttggcagacatttttcttgaaaaggatgaagtgagcctatcactttaaagaaaacaactgaggctaggcacagtggctcacacctgaaatcccagcactttggaaggccgaggcaggcagatctcttgaggtcaggagttccagaccagcctgggtaacatggcgaaaccccgtctttactaaaaatacaaaaaaatatagctggggatggtggcgtgtgcctgtaatcccagctaccagctactcaggaggttgagttgcttgaacccaggaggcggaggatgcagtgagccaagatcgcaccactgcactccagcctgggtgacagagtgagactgtctcaaaaaaaaaaaaaaaaagaaaagaaaaatgactgacagtaattgttaccaaggataaaatttggctttcaaatgaaaattagaattttggaaagcttaacctgccactgtgaacttgacagcttcctaatacttaaaagccttttctgatgaggtctgtgatgattcttaacgtacgtgtgtgtgtgtgtgtgtgtgtgtgttgatcacatgagaaaaaacacaaacatatttgacacggtataatgaaatgtgtctacatttggaagatttacataactcagtgaaccattattttctaaatggctgatgcatggtgttatatagtcatgcatgggtaaaagatccgttcaagtataagatagaccaatggattttaatgtaagagagaacaaagtccattgatagaattctagattccatatcacacctaatattcaagaaatgactacttgtcaagctctggtgtagtgtcagagaatacccaaaaccatctgaggctacgactaaaatactcttttcaactatgtatctgcgtacggctggattttctttatatacttccaccaaaacagcatgttgcaacagattgaatgcagaatattttaatgttttccattaacttagatattagaaatttacaaaatgggaaaaattcactcctcttattgatttaaaacctacatgtatataattagtttcataaagagttacgaggttggatgtcttggtctgtctagtgttgatagaacacttggggctgggtaatttacaaagaaaagaggtttacttagcttctttctgcaggctgagaagtgtgagaagtgtggcattggctgctgcctggcttctggtgagggctttttatgctgcattgtaacatggcggagaaggtcaaaggtggaagcagacacatgcaaagaggcaaaaccaggggcttcatcacttcataacaacccattccctcgggatgccagtgctaatctagtctcttgacagaactcactactaggagaaaggcaccaagccattcatgagggatttgcccctgtgacccaaacacctcccactaggcatcacctcccagtgaggccacaatgaggatcaaatttcaacatgagttgacaactcaaaccgtaacactgggcatgtatgcacctaaacttttacttcatttactcttctcagaaaacggtccggatgtaccccttccagattcacagcatcgctctctccacctttgcctcgctcattggcccctttggaggattcttygcaagtggattcaaacgagcctttaaaatcaaagtaggaaaaccgtcttacgttcctctcatctcactccctcacccrtcttctgcctttctcccccttccctgccccctccaaaatactaggctgtacaccctggcatttaatgtgtgatcttgacccatgcactgaatttaggtgagttaattaataacaatattttcaggaaaatgcaatcgttgtttttcagtttatttgttaatatatctttcttcaaaagaacattttgggccaggcagtggctcatgtctgtaaccccagcactttaagaggccaaggcgggaggatcacttgaggctaggagttagaaagtagcctgagcaacatagcaagactcctgtctttattaagtaaatgaaataagaacattttgtaatgcaataaaattgtgtcctaatatagcctcaccattagatttcatacttctcaccttctattgccctcagctactcagcacagaagcctgacattggggtgggaccattaggctgggattggttagtggctgagcccaagttcacccatccttcccctgcckctaacaggactttgccaataccattcctggccatggaggcatcatggatcgctttgactgccagtatctgatggccacctttgtcaatgtatacatcgccagttttatcaggtatagtacctttccatctgaaccaagttggtggatttttaagtacggtgcaattctagarttttagcggcatctaagttccagtgaaaagcatcccaaataatgcagttttcagttgtttctgcttacagattttctgaggcctcctgtcatctgttaatagataactctctgatccagagatcrgagcagccactcagataatcaggccctggaagcttccgggccctagctcagtgctgtttcttcacattctgttccagaggccctaacccaagcaaactgattcagcagttcctgactttacggccagatcagcagctccacatcttcaacacgctgcggtctcatctgatcgacaaagggatgctgacatccaccacagaggacgagtaggggccacccagggccaggagaacaggaacagaactgagcaggggcaggtctccaaggcaagcccagctggtgtgacttagacaatgacgaggcttcaactcactgtcttttttttttttttttggagggtattttttatttgtgggttcaaaaaatctgtatatacagtctatgtgtttagaatttgtgttgtaagtaaactacagctttgagttggaaagaagtcacgggttgtaaaaccatttggatttttttaaaacaaaagtattaataatctggaagacagtgttgcccaggtcaggagtgttttcttggtggttccagcccccatcaattgaactgtttctgggctcagtcagacacagacattcatctgtgtctgaccaaatcaggggacttccccacctgtggtgggaggcacagcttagatgttttgtacacctggtcttttctagaaatccctgcttggagctgcagaagggttgccttctgtaggtcggaggaatggaggcttactaaccaggtaagccttctatgcatccacaccaaaatcctgcagaatgtaagtaagctctgctttataagatgggttcaccttcatcgcagactgaaagtttcagtttttatttttttcagaaagcacgaaaaattatttataatagtctggagaaaaaacacactgtaatatttcaagtgtatgcagtagaatgtactgtaactgagccctttcccacatgtctaggctccaatgtctcctgtaggtccacctaactgtgtgttttcagggacaatgccatccatgtttgtgctgtagacttgctgctgctgaatcctttctggggactttctcatcgggcagggagcagagggcttctcgttcatgcaccctttgcctgaacacccatgtagctgctgtgttgtgtatatattactcttaagaggagtgtgtgtgtctgtgtttgttttaaaagtcacttatttcttacagtgatttcaattgcaccatgacttcttcactaaaaccacaaagtcctgcttaaaactatggaaaacctaacctgattagagccttgactattttgaagattaaatgcacactttttatataatgtgaccagtttaaatgtagtttgtattgtactgggggacctttygttgttgttgtttgcttaaactgtgattttttttcccctccctaatttcaggggtgagattgactttgggaagacagattagttctttgtcaggccaacaagtgatggagtgcgggagagagaacttggcacccaaatatatcaaactattccgtgccgtggatgttttcattgccaacgagggtgtaatgatttgcttctgcaccttggtctagtgctggtttgtggtgtttttgtttgtaaattagcctcactgcctccctgaaagtgcacagtcagcccaggtctctagagtgtccagcagaggatggagccctcgggatgtttcagctcacacatccttgagtgacttcccatatgtgtgtggggctgaagcggcttctttccgctgaacttttatttccatttcagcctcgtggcttctcttattcaggtccaaggccccttaaaaacaaaacatattatcgcaagggctttcatttcagtattggctgtgtcactggcaggatgcatcactctccagggcctctttttcggagctactcccaattccactcttctgtgattctggctgagcaagttcatgccggtagaggctcattaagtgaggtcctgggcaccccccaaacaggaagtgttttcaggcccttacatgcttatccttaaggtgagtaggtatctcagcagcacacccgaacagtaaaggtgatcaataatgaaactgtagttttcagattgaagaatgaacctggatcaccaaactagataccgaaagggctcctcatttgtctcttttgtcccattgtgggcatatggtgggctccttgagaggagggagtctcagctggggcctggctgcagagacctgctcttgaatagggctgcctttgggatcagggagccgagcatactggscaaggctcatcatgttcctttgtggaagtggttacttggtgggggtggggtggggaaggggggtctaggaagccgaagctgagtgcgcactagagctgctagcaggcaggccagagggtcagcttgtgttttattttctgatttctcctgcatgctttctggagatgaggattttttgtcaggtagctaggagagcactgccaccttgtgtccatatagcacaatgtttctctttcctattcacagacaagattcaagaaaccatttttacgtgtgtacattcaaatcttcatgaatggcatcacttgctttagacccattttttttttattggtcagaaataaaatgtgactgcaactgtgtgccctcccttgtcgtgaattccctgtttatcacttccatgcatggttttatgcttctcatttgttyatgtattcatgaatactgcatagtcctgattcagagacttttgctttgctttccaacttgtatccctacattctcacaacagccttcttacctcgggtgagagtcatgagcaccttaccaggcagggagcttccccaggatagtgtggtggagtcaggactcactccatcctgcactttacccacaggacacctggagggtcccccagccctgcttgcttttgtgaacgtcgtgtgagtacaccgaggtgttgcagctttccttccctctagctcaggaggcctggcctgagccaggttggagcttaaattgctgttggctcctgcctggtggaacaagggggtcatagaaaccagggctgatgggcaccccccagcccctgggagctctgctcatgaccgctcacagggtaccgagtctttgccttttgtgtgtgcgcatgctgccctcttaactgcttttagtattcagaaaggttccatttatgttttactcctgaaagtgaaaccctcttaggcaacttgtttcatattctgggcattttagtagctacagtattttgcatttaaaatgtaattactcttagtattgtacagccctataatgtatgagaactagtttcacatcctttgaaactaatctctttcattggggaggatacaacttttgactttacacaggtggactttgaatccatttttatagaatttttttccactgtaacttgacctatattatgcaagaaaatcccaaaaatatgttttaagggagactacacagaccttgtgatttggtctgagctagttgctgagttgactggagccttatttgaatggatctttgagttgagatcttcacactgtcagtgagcccttggctcagcccttgtcacctgtttgtatggggaccatgtttcccaaagctcaggttcatctccactattgacagagtcgggtagtgggagagtataagtgacttgagacagagtgtccttgctcagaaaactgtgaagcaggggtcttgttagttacaaagccagtcctagttgcatgtccaagggggtagattttcatcaccctactaaatgtggtatgtcactgctgaagccttttcctgttttagtaatatcttaggcactattgtcttttgtcttccagagtaacatatctgggcccacctttcttgcacactgtgattatgtgctaagaaaagggtggagttgggaggacaatttcacttgaacaggtttctgttcttctgaggtcagggtggggaggatgtccaggtgacttttatggacacattgcaagacagtaagccgcggatggactctcacttgtgctttggaacactggactccaaagagcaggtggaacaaactctggcctgaagatgatggctaatactcaggcagagccccgtattcttccctgacttggtcaaaacaaacttccttttcccttgatcaccctgcacgcagctgcccagcttccagtttttaaagagatgaacagctctcacttcctgactcagtttctcttgttgggtgggggccttgtgccacaacctgcatggggtgctagggtttaaaccaagtggtcacgaaggattcttatctcagggctctgcctggcccaccttctcttgggcctggactctccttatccacatccctgcagaaggtgggccctattctcagaagagtcctggctgctgttgccatctgaatgcgcccttccctttcaggttgaccagcagtggccttacctggcctctcaggtggatggaggctgttctcatctggggctgtctcttgattaaggctgtcacctgtttgtatagggaccatgtttcccaacgcactttgagtgcagtttaggaggtatcctttggatgctgaagtgttgggattttgaggacatgcggatgatttatgagaatagaggggcagagtttgtgaagtctagggttttttgtccagtgggtttcaaatttgttggctgtttaaagaccctgtctcctcccccaccctccccttccttttcccatcaaatgcctacctactgaggcgccttctctttttattcttgagccaatgagatatcagtgtgtttattaataaggattgcaatagtatagtgcttaatatgtgccaggcatagtgctaagggtttacatacgttatcccttttaatccagaaaacagcctttgattaggtattgttgtctccattttatagatgaggaaactgaggcagtatgactgaggccgagagcagtggttaagacagactttgggatcaaatcaccctaggtgcgggcaggtttctaggctgctctaagcttctaccttgaaggcagttgggtctgataatagtaccttcttcctggggtggttgtgaggatataacgaggtaatgcatgtaagcatttagtaccatgcctggcacatagtaagcactcaataaatggtagttacttttgttgagctcagctggtagtttgacctccgttggtgcaatgccagagatgggattgtcagccaccacactgccaccaccctgcacacagtctgggtccctccgagagaagcacgccaaccttaacatcccctacagcatcttggtgcttcacacaccatttaggaggccaccctaacgaggcaagaggacatgggggtgtgcagaagttctgttcttagtgagaatggctggcctgagaatccagctcacctcctctgcccacagtctggactgcttgtgggaaggccatctcctcctgtctggtggtacctccactctgggcagggagggcctgtctgtgactcgctctggaccccacttcccgctctggccaagggctgtcttctgtgcacatagctcaggagcctgcagcagttccctgtatgggtggatgtcctcaggggccaagaagagaagaatggggacaacagaaacctgctttgtaggggattatgtagactaaaagcctagaagttctgcccacatccttatgacgcagccaatctggagcttcatgtttccttctaaaagtagtaaccgggtagaagtgggtgacccattgaggacacatgatgtgaggtatttctgccggattctaggttagcaaagactcaaatgggtgactcatgaatgaagggagaacaggcacaggacttaatgaaaagagtttcttgaacttagttttctgaatgggggtggggagttggggcacgtgtgtgtaagggkaggctgcctcactttgaaggaatggtgttggctaacaggatccatgaaattcctaggtcagttgaataataactgaactactggtttgactgtggattatttcctgggtattagtgggacccaacagcacattgctattaatagtatggaaataatggtccctctgtttcattgaattgctgaagtaatgataatgccatgaaccaggagaagatggttgtgggggtttctaggaagcagctgctgtgacaggccaatcccaggcttgcccccgagccctcctgtccttctgggtttgtgtttgccttgcctggtgcttcctccctcattgtgttgttgaatagacctaggcagccttgtatccatagaaagcctccactgctgggccggggagggggttgtggtaagggccctctggaaatcaagcagagaatgcctttgcagtggtctcccgggcattgggcagggcctagccttttgcagcccccagaggaccttgcctgcataaagcactcagaagggttagccacctggtgattttgtctctagtgaaactgtgtttgccgataatcatccacatagccacctctgtcctcgcagtttggatgcctttttttgacacctgcgctaggttcttgtatgctggcttttcttaaaggaacagcagagtagaaaagaggttgagaatgttttctagcaggcagaatgtgcatacatgttttcatgagtgtcctttgggtgctgtttcttttaaatcctctgtgcacagggctctggcctttagtaaactgtttttctgtcttacgtcatgctgactgggtgctaggggctgattacaaaggggaagagttgaacagacatcaggggccgatgaaaccaaaggactaggagtcaggagaacaagtcagggattaggagacagcggtttggtttattgttatccagctggaggactcctaggggcagcagcaggaggaataccagggccacggaggggccaggagtctcacagtggagggcagactctaacagatgccagctgaacgctcgctggccctggatgtcatacgagttggggaccagaaatctgggctcagagaacccgtccagggagatttgaagccatgggttatcttctagagttgatactgataatatattttaatttttattgatgtttaataccttctgaaacaggagggtaagatcagatgggaagcccctctgttgaaggatcttgggaaccttggtggttttttttttttggttttttttttttgatcgagctgtggacatccttcttaattcgattctgaggatttgtttaactaaaaagttcccaaacacagaaagggcctccccacctgctttggggagctgtctgtgctgggagtgccaggcatcccatgggacccatcactgccagtgtctgtgcctcccagaggtcagccgtgtctgccctggctctgtctcctctgtgacagggcagagcatttctggtcagtttctccatggtgcctcccacccctttgtaaagtggatggacatgatggaattcagttgtctcaccctgatagcctgggtgttgatattcactttacccgcactcagacacaggcgaccttgaa
